(19) United States
(12) Patent Application Publication
(10) Pub. No.: US 2019/0352654 A1
(43) Pub. Date: Nov. 21, 2019

(54) TARGETED GENE DEMETHYLATION IN PLANTS

(71) Applicant: The Regents of the University of California, Oakland, CA (US)

(72) Inventors: Steve E. JACOBSEN, Agoura Hills, CA (US); Javier GALLEGO-BARTOLOMÉ, Beverly Hills, CA (US); Ashot PAPIKIAN, Glendale, CA (US); Jason GARDINER, Los Angeles, CA (US)

(73) Assignee: The Regents of the University of California, Oakland, CA (US)

(21) Appl. No.: 16/480,623

(22) PCT Filed: Jan. 22, 2018
(86) PCT No.: PCT/US2018/014741

§ 371 Date: Jul. 24, 2019

Related U.S. Application Data
(60) Provisional application No. 62/450,929, filed on Jan. 26, 2017.
(60) Provisional application No. 62/547,053, filed on Aug. 17, 2017.

(51) Int. Cl. C12N 15/82; A61K 38/17; C12N 15/86

(52) U.S. Cl. CPC C12N 15/8213; C12N 15/86; C12N 15/8216; A61K 38/17

(57) ABSTRACT

The present disclosure relates to the use of recombinant proteins for inducing epigenetic modifications at specific loci, as well as to methods of using these recombinant proteins for modulating the expression of genes in plants.

### CROSS-REFERENCE TO RELATED APPLICATIONS

[0001] This application claims the benefit of U.S. Provisional Application No. 62/450,929, filed on Jan. 26, 2017, and U.S. Provisional Application No. 62/547,053, filed on Aug. 17, 2017, the disclosures of which are incorporated herein by reference in their entirety.

### SUBMISSION OF SEQUENCE LISTING ON ASCII TEXT FILE

[0002] The content of the following submission on ASCII text file is incorporated herein by reference in its entirety: a computer readable form (CRF) of the Sequence Listing (file name: 262232001340SEQLIST.txt, date recorded: Jan. 22, 2018, size: 769 KB).

### FIELD

[0003] The present disclosure relates to the use of recombinant proteins for inducing epigenetic modifications at specific loci, as well as to methods of using these recombinant proteins for modulating the expression of genes in plants.

### BACKGROUND

[0004] Epigenetic marks are enzyme-mediated chemical modifications of DNA and of its associated chromatin proteins. Although epigenetic marks do not alter the primary sequence of DNA, they do contain heritable information and play key roles in regulating genome function. Such modifications, including cytosine methylation, posttranslational modifications of histone tails and the histone core, and the positioning of nucleosomes (histone octamers wrapped with DNA), influence the transcriptional state and other functional aspects of chromatin. For example, methylation of DNA and certain residues on the histone H3 N-terminal tail, such as H3 lysine 9 (H3K9), are important for transcriptional gene silencing and the formation of heterochromatin.

[0005] Different pathways involved in epigenetic gene expression regulation have been previously described, and include histone deacetylation, H3K27 and H3K9 methylation, H3K4 demethylation, and DNA methylation of promoters. In plants, proteins generally do not link the recognition of a specific DNA sequence with the establishment of an epigenetic state. Thus, endogenous plant epigenetic regulators generally cannot be used for epigenetic modifications of specific genes or transgenes in plants. However, the ability to specifically induce epigenetic modifications at a target locus is desirable as this may allow for controlled expression of the locus (e.g. control over gene expression). Moreover, there is currently no robust method for selectively demethylating and activating the expression of plant genes.

[0006] Accordingly, a need exists for epigenetic regulators that are capable of being targeted to specific loci to induce epigenetic modifications at those loci in plants.

### BRIEF SUMMARY

[0007] In one aspect, the present disclosure relates to a method for reducing methylation of a target nucleic acid in a plant, including: (a) providing a plant including a recombinant polypeptide including a DNA-binding domain and a TET1 polypeptide or fragment thereof; and (b) growing the plant under conditions whereby the recombinant polypeptide is targeted to the target nucleic acid, thereby reducing methylation of the target nucleic acid. In some embodiments, the DNA-binding domain includes a zinc finger domain. In some embodiments, the zinc finger domain includes two, three, four, five, six, seven, eight, or nine zinc fingers. In some embodiments, the zinc finger domain is a zinc finger array. In some embodiments, the zinc finger domain is selected from the group of a Cys2His2 (C2H2) zinc finger domain, a CCCH zinc finger domain, a multi-cysteine zinc finger domain, and a zinc binuclear cluster domain. In some embodiments, the DNA-binding domain is selected from the group of a TAL effector targeting domain, a helix-turn-helix family DNA-binding domain, a basic domain, a ribbon-helix-helix domain, a TBP domain, a barrel dimer domain, a real homology domain, a BAH domain, a SANT domain, a Chromodomain, a Tudor domain, a Bromodomain, a PHD domain, a WD40 domain, and a MBD domain. In some embodiments, the DNA-binding domain includes a TAL effector targeting domain. In some embodiments, the DNA-binding domain includes three C2H2 zinc finger domains. In some embodiments that may be combined with any of the preceding embodiments, the TET1 polypeptide includes an amino acid sequence that is at least 80% identical to SEQ ID NO: 8. In some embodiments that may be combined with any of the preceding embodiments, the target nucleic acid is an endogenous nucleic acid. In some embodiments that may be combined with any of the preceding embodiments, the target nucleic acid is a heterologous nucleic acid. In some embodiments that may be combined with any of the preceding embodiments, expression of the target nucleic acid is activated as compared to a corresponding control nucleic acid.

[0008] In another aspect, the present disclosure provides a recombinant nucleic acid including a plant promoter and which encodes a recombinant polypeptide including a DNA-binding domain and a TET1 polypeptide or fragment thereof. The present disclosure further relates to expression vectors including the recombinant nucleic acid of the preceding embodiment, and a host cell including the expression vector of the preceding embodiment. The present disclosure also relates to a recombinant plant including the recombinant nucleic acid and/or polypeptide of the preceding embodiments.

[0009] In another aspect, the present disclosure provides a plant having reduced methylation of a target nucleic acid as a consequence of the method of any one of the preceding embodiments, as well as a progeny plant of the plant of the preceding embodiment. In some embodiments, the progeny plant has reduced methylation of the target nucleic acid and does not include the recombinant nucleic acid and/or polypeptide.

[0010] In another aspect, the present disclosure provides a method for reducing methylation of a target nucleic acid in a plant, including: (a) providing a plant including a recombinant polypeptide including a nuclease-deficient CAS9 polypeptide (dCAS9) or fragment thereof and a TET1 polypeptide or fragment thereof; and a crRNA and a tracrRNA, or fusions thereof; and (b) growing the plant under conditions whereby the recombinant polypeptide is targeted to the target nucleic acid, thereby reducing methylation of the target nucleic acid. In some embodiments, the TET1 polypeptide includes an amino acid sequence that is at least 80% identical to SEQ ID NO: 8. In some embodiments that may be combined with any of the preceding embodiments, the target nucleic acid is an endogenous nucleic acid. In some embodiments that may be combined with any of the preceding embodiments, the target nucleic acid is a heterologous nucleic acid. In some embodiments that may be combined with any of the preceding embodiments, expression of the target nucleic acid is activated as compared to a corresponding control nucleic acid.

[0011] In another aspect, the present disclosure provides a recombinant nucleic acid including a plant promoter and which encodes a recombinant polypeptide including a nuclease-deficient CAS9 polypeptide (dCAS9) or fragment thereof and a TET1 polypeptide or fragment thereof. The present disclosure further relates to expression vectors including the recombinant nucleic acid of the preceding embodiment, and a host cell including the expression vector of the preceding embodiment. The present disclosure also relates to a recombinant plant including the recombinant nucleic acid and/or polypeptide of the preceding embodiments.

[0012] In another aspect, the present disclosure provides a plant having reduced methylation of a target nucleic acid as a consequence of the method of any one of the preceding embodiments, as well as a progeny plant of the plant of the preceding embodiment. In some embodiments, the progeny plant has reduced methylation of the target nucleic acid and does not include the recombinant nucleic acid and/or polypeptide.

[0013] In another aspect, the present disclosure provides a method for reducing methylation of a target nucleic acid in a plant, the method including: (a) providing a plant including a recombinant TET1-like polypeptide or fragment thereof; and (b) growing the plant under conditions whereby the recombinant polypeptide is targeted to the target nucleic acid, thereby reducing methylation of the target nucleic acid.

[0014] In another aspect, the present disclosure provides a method for reducing methylation of a target nucleic acid in a plant, the method including: (a) providing a plant including a recombinant nucleic acid encoding a TET1-like protein or fragment thereof; and (b) growing the plant under conditions where the recombinant nucleic acid is expressed and where the recombinant polypeptide is targeted to the one or more target nucleic acids, thereby reducing methylation of the target nucleic acid.

[0015] In another aspect, the present disclosure provides a method for reducing methylation of a target nucleic acid in a plant, the method including: (a) providing a plant including a recombinant nucleic acid encoding a TET1-like protein or fragment thereof; and a crRNA and tracrRNA, or fusions thereof, and where the plant expresses a dCAS9 protein; and (b) growing the plant under conditions where the recombinant nucleic acid is expressed and where the recombinant polypeptide is targeted to the one or more target nucleic acids, thereby reducing methylation of the target nucleic acid. In some embodiments, the recombinant polypeptide includes a dCAS9 protein or fragment thereof. In some embodiments, the recombinant polypeptide includes an MS2 protein or fragment thereof. In some embodiments, the recombinant polypeptide includes an scFV antibody or fragment thereof.

[0016] In another aspect, the present disclosure provides a method for reducing methylation of a target nucleic acid in a plant, including: (a) providing a plant including: a first recombinant polypeptide including a nuclease-deficient CAS9 polypeptide (dCAS9) or fragment thereof and a multimerized epitope; a second recombinant polypeptide including a TETI polypeptide or fragment thereof and an affinity polypeptide that specifically binds to the epitope; a crRNA and a tracrRNA, or fusions thereof; and (b) growing the plant under conditions whereby the first and second recombinant polypeptides are targeted to the one or more target nucleic acids, thereby reducing methylation of the target nucleic acid. In some embodiments, the dCAS9 polypeptide has an amino acid sequence that is at least 80% identical, at least 85% identical, at least 90% identical, at least 95% identical, or 100% identical to SEQ ID NO: 125. In some embodiments that may be combined with any of the preceding embodiments, the multimerized epitope includes a GCN4 epitope. In some embodiments, the multimerized epitope includes about 2 to about 10 copies of a GCN4 epitope. In some embodiments that may be combined with any of the preceding embodiments, the first polypeptide includes one or more linkers that link polypeptide units in the recombinant polypeptide. In some embodiments that may be combined with any of the preceding embodiments, the first polypeptide includes a nuclear localization signal (NLS). In some embodiments that may be combined with any of the preceding embodiments, the TET1 polypeptide includes an amino acid sequence that is at least 80% identical to SEQ ID NO: 8. In some embodiments that may be combined with any of the preceding embodiments, the affinity polypeptide is an antibody. In some embodiments, the antibody is an scFv antibody. In some embodiments, the antibody includes an amino acid sequence that is at least 80% identical to SEQ ID NO: 132. In some embodiments that may be combined with any of the preceding embodiments, the second polypeptide includes one or more linkers that link polypeptide units in the recombinant polypeptide. In some embodiments that may be combined with any of the preceding embodiments, the crRNA and the tracrRNA are fused together, thereby forming a guide RNA (gRNA). In some embodiments that may be combined with any of the preceding embodiments, expression of the nucleic acid is increased in the range of about 2-fold to about 100-fold as compared to a corresponding control. In some embodiments that may be combined with any of the preceding embodiments, expression of the nucleic acid is decreased in the range of about 2-fold to about 100-fold as compared to a corresponding control.

[0017] In another aspect, the present disclosure provides a recombinant vector including: a first nucleic acid sequence including a plant promoter and that encodes a recombinant polypeptide including a nuclease-deficient CAS9 polypeptide (dCAS9) or fragment thereof and a multimerized epitope; a second nucleic acid sequence including a plant promoter and that encodes a recombinant polypeptide including a TET1 polypeptide or fragment thereof and an affinity polypeptide that specifically binds to the epitope; and a third nucleic acid sequence including a promoter and that encodes a crRNA and a tracrRNA, or fusions thereof.

[0018] Also provided are host cells including the vector or one or more of the recombinant polypeptides or nucleic acids of any of the preceding embodiments, and a recombinant plant including the vector or one or more of the recombinant polypeptides or nucleic acids of any of the preceding embodiments.

[0019] In another aspect, the present disclosure provides a plant having reduced methylation of a target nucleic acid as a consequence of the method of any of the preceding embodiments. Also provided is a progeny plant of the plant of the preceding embodiment. In some embodiments, the progeny plant has reduced methylation of the target nucleic acid and does not include the recombinant polypeptides.

[0020] In another aspect, the present disclosure provides a method for reducing methylation of a target nucleic acid in a plant, including: (a) providing a plant including a recombinant polypeptide including a DNA-binding domain and a methylcytosine dioxygenase polypeptide that includes the amino acid sequence of SEQ ID NO: 189; and (b) growing the plant under conditions whereby the recombinant polypeptide is targeted to the target nucleic acid, thereby reducing methylation of the target nucleic acid. In some embodiments, the DNA-binding domain comprises a zinc finger domain. In some embodiments, the zinc finger domain includes two, three, four, five, six, seven, eight, or nine zinc fingers. In some embodiments, the zinc finger domain is a zinc finger array. In some embodiments, the zinc finger domain is selected from the group consisting of a Cys2His2 (C2H2) zinc finger domain, a CCCH zinc finger domain, a multi-cysteine zinc finger domain, and a zinc binuclear cluster domain. In some embodiments, the DNA-binding domain is selected from the group consisting of a TAL effector targeting domain, a helix-turn-helix family DNA-binding domain, a basic domain, a ribbon-helix-helix domain, a TBP domain, a barrel dimer domain, a real homology domain, a BAH domain, a SANT domain, a Chromodomain, a Tudor domain, a Bromodomain, a PHD domain, a WD40 domain, and a MBD domain. In some embodiments, the DNA-binding domain includes a TAL effector targeting domain. In some embodiments, the DNA-binding domain includes three C2H2 zinc finger domains. In some embodiments that may be combined with any of the preceding embodiments, the methylcytosine dioxygenase polypeptide is a TET polypeptide. In some embodiments, the TET polypeptide is a TET1 polypeptide. In some embodiments, the TET1 polypeptide includes the catalytic domain of TET1. In some embodiments, the TET1 polypeptide includes an amino acid sequence that is at least 80% identical to SEQ ID NO: 8. In some embodiments that may be combined with any of the preceding embodiments, the target nucleic acid is an endogenous nucleic acid. In some embodiments that may be combined with any of the preceding embodiments, the target nucleic acid is a heterologous nucleic acid. In some embodiments that may be combined with any of the preceding embodiments, expression of the target nucleic acid is activated as compared to a corresponding control nucleic acid.

[0021] In another aspect, the present disclosure provides a recombinant nucleic acid including a plant promoter and which encodes a recombinant polypeptide including a DNA-binding domain and a methylcytosine dioxygenase polypeptide that includes the amino acid sequence of SEQ ID NO: 189.

[0022] In another aspect, the present disclosure provides a method for reducing methylation of a target nucleic acid in a plant, including: (a) providing a plant including: a first recombinant polypeptide including a nuclease-deficient CAS9 polypeptide (dCAS9) or fragment thereof and a multimerized epitope; a second recombinant polypeptide including a methylcytosine dioxygenase polypeptide that includes the amino acid sequence of SEQ ID NO: 189, and an affinity polypeptide that specifically binds to the epitope; and a crRNA and a tracrRNA, or fusions thereof; and (b) growing the plant under conditions whereby the first and second recombinant polypeptides are targeted to the one or more target nucleic acids, thereby reducing methylation of the target nucleic acid. In some embodiments, the dCAS9 polypeptide has an amino acid sequence that is at least 80% identical, at least 85% identical, at least 90% identical, at least 95% identical, or 100% identical to SEQ ID NO: 125. In some embodiments that may be combined with any of the preceding embodiments, the multimerized epitope includes a GCN4 epitope. In some embodiments, the multimerized epitope includes about 2 to about 10 copies of a GCN4 epitope. In some embodiments that may be combined with any of the preceding embodiments, the first polypeptide includes one or more linkers that link polypeptide units in the recombinant polypeptide. In some embodiments that may be combined with any of the preceding embodiments, the first polypeptide includes a nuclear localization signal (NLS). In some embodiments that may be combined with any of the preceding embodiments, the methylcytosine dioxygenase polypeptide is a TET polypeptide. In some embodiments, the TET polypeptide is a TET1 polypeptide. In some embodiments, the TET1 polypeptide includes the catalytic domain of TET1. In some embodiments, the TET1 polypeptide includes an amino acid sequence that is at least 80% identical to SEQ ID NO: 8. In some embodiments that may be combined with any of the preceding embodiments, the affinity polypeptide is an antibody. In some embodiments, the antibody is an scFv antibody. In some embodiments, the antibody includes an amino acid sequence that is at least 80% identical to SEQ ID NO: 132. In some embodiments that may be combined with any of the preceding embodiments, the second polypeptide includes one or more linkers that link polypeptide units in the recombinant polypeptide. In some embodiments that may be combined with any of the preceding embodiments, the crRNA and the tracrRNA are fused together, thereby forming a guide RNA (gRNA). In some embodiments that may be combined with any of the preceding embodiments, expression of the nucleic acid is increased in the range of about 2-fold to about 100-fold as compared to a corresponding control. In some embodiments that may be combined with any of the preceding embodiments, expression of the nucleic acid is decreased in the range of about 2-fold to about 100-fold as compared to a corresponding control.

[0023] In another aspect, the present disclosure provides a recombinant vector including: a first nucleic acid sequence including a plant promoter and that encodes a recombinant polypeptide including a nuclease-deficient CAS9 polypeptide (dCAS9) or fragment thereof and a multimerized epitope; a second nucleic acid sequence including a plant promoter and that encodes a recombinant polypeptide including a methylcytosine dioxygenase polypeptide that includes the amino acid sequence of SEQ ID NO: 189, and an affinity polypeptide that specifically binds to the epitope; and a third nucleic acid sequence including a promoter and that encodes a crRNA and a tracrRNA, or fusions thereof.

[0024] Also provided are host cells including the vector or one or more of the recombinant polypeptides or nucleic acids of any of the preceding embodiments, and a recombinant plant including the vector or one or more of the recombinant polypeptides or nucleic acids of any of the preceding embodiments.

[0025] In another aspect, the present disclosure provides a plant having reduced methylation of a target nucleic acid as a consequence of the method of any of the preceding embodiments. Also provided is a progeny plant of the plant of the preceding embodiment. In some embodiments, the progeny plant has reduced methylation of the target nucleic acid and does not include the recombinant polypeptides.

### DESCRIPTION OF THE FIGURES

[0026] The patent or application file contains at least one drawing executed in color. Copies of this patent or patent application publication with color drawings will be provided by the office upon request and payment of the necessary fee.

[0027] FIG. 1 illustrates flowering time in Col-0 wild-type plants, fwa mutant plants, and T1 transgenic plants carrying the ZF108_TET1-CD construct in the Col-0 background.

[0028] FIG. 2 illustrates results of CHOP-PCR in Col-0 wild-type plants, fwa mutant plants, and T1 transgenic plants carrying the ZF108_TET1-CD construct in the Col-0 background. DNA of different lines as shown in the figure (ZF108_TET1-CD lines are labelled #1, 6, 7, 9, 12, 15, and 16) were digested with the DNA methylation sensitive enzyme McrBC. A region of the FWA promoter was analyzed. As a control region, the DNA methylated gene body of another gene was analyzed. The height of each bar represents the ratio of the amount of PCR product from the McrBC digested sample to the amount of PCR product from the undigested sample.

[0029] FIG. 3 illustrates Whole Genome Bisulfite Sequencing results. DNA methylation of four independent transgenic lines carrying the ZF108_TET1-CD construct that showed the late flowering phenotype were analysed by BS-seq. Methylation at different contexts (CG, CHG and CHH, where H is C, T, or A) is shown for a wild-type Col-0 plant and a representative ZF108_TET1-CD line. The FWA promoter region is marked in a red box.

[0030] FIG. 4 illustrates a zoomed-out view of the Whole Genome Bisulfite Sequencing results presented in FIG. 3. DNA methylation of four independent transgenic lines carrying the ZF108_TET1-CD construct that showed the late flowering phenotype were analysed by BS-seq. Methylation at different contexts (CG, CHG and CHH, where H is C, T, or A) is shown for a wild-type Col-0 plant and a representative ZF108_TET1-CD line. The FWA promoter region is marked in a red box.

[0031] FIG. 5 illustrates RNA-seq analysis of Col-0 wild-type plants, fwa mutant plants, and T1 transgenic plants carrying the ZF108_TET1-CD construct. Four independent ZF108_TET1-CD lines, fwa-4 plants, and wild-type Col-0 control plants were analysed by RNA-seq. RPKM fold change between wild-type Col-0 and ZF108_TET1-CD lines, or between wild-type Col-0 and fwa-4, is presented for the FWA gene and the control housekeeping genes PP2A and IPP2. The fold change value in expression of each gene in the indicated line as compared to Col-0 wild-type plants is indicated on top of each bar.

[0032] FIG. 6 illustrates the structure of exemplary fusion constructs used in a modified CRISPR-targeting scheme involving the use of MS2 proteins.

[0033] FIG. 7 illustrates how various crRNA sequences map to the FWA locus.

[0034] FIG. 8 illustrates the structure of exemplary fusion constructs used in a modified CRISPR-targeting scheme involving the use of SunTag constructs.

[0035] FIG. 9 illustrates a schematic of a SunTag targeting system that was used successfully to demethylate the FWA promoter.

[0036] FIG. 10 illustrates illustrates Whole Genome Bisulfite Sequencing results. DNA methylation of a late flowering transgenic line that carries the gRNA4_U6_NOS_TET1CD_2xNLS_1xHA_sfGFP_scFv_UBQ10_INSULATOR_UBQ10_dCAS9_1xHA_3xNLS_10xGCN422aa_OCS (SunTag22aa-TET1) construct was analyzed by BS-seq. Methylation at different contexts (CG, CHG and CHH, where H is C, T, or A) is shown for a wild-type Col-0 plant and the SunTag-TET1 line. The FWA promoter region is marked in a red box.

[0037] FIG. 11 illustrates a zoomed-out view of the Whole Genome Bisulfite Sequencing results presented in FIG. 10. DNA methylation of a late flowering transgenic line that carries the gRNA4_U6_NOS_TET1CD_2xNLS_1xHA_sfGFP_scFv_UBQ10_INSULATOR_UBQ10_dCAS9_1xHA_3xNLS_10xGCN422aa_OCS (SunTag22aa-TET1) construct was analyzed by BS-seq. Methylation at different contexts (CG, CHG and CHH, where H is C, T, or A) is shown for a wild-type Col-0 plant and the SunTag-TET1 line. The FWA promoter region is marked in a red box.

[0038] FIG. 12 illustrates Whole Genome Bisulfite Sequencing results. DNA methylation of a late flowering transgenic line that carries the gRNA4_U6_NOS_TET1CD_2xNLS_1xHA_sfGFP_scFv_UBQ10_INSULATOR_UBQ10_dCAS9_1xHA_3xNLS_10xGCN414aa_OCS (SunTag14aa-TET1) construct was analyzed by BS-seq. Methylation at different contexts (CG, CHG and CHH, where H is C, T, or A) is shown for a wild-type Col-0 plant and the SunTag-TET1 line. The FWA promoter region is marked in a red box.

[0039] FIG. 13 illustrates a zoomed-out view of the Whole Genome Bisulfite Sequencing results presented in FIG. 12. DNA methylation of a late flowering transgenic line that carries the gRNA4_U6_NOS_TET1CD_2xNLS_1xHA_sfGFP_scFv_UBQ10_INSULATOR_UBQ10_dCAS9_1xHA_3xNLS_10xGCN414aa_OCS (SunTag14aa-TET1) construct was analyzed by BS-seq. Methylation at different contexts (CG, CHG and CHH, where H is C, T, or A) is shown for a wild-type Col-0 plant and the SunTag-TET1 line. The FWA promoter region is marked in a red box.

[0040] FIG. 14 illustrates RNA-seq analysis of Col-0 wild-type plants and one independent T1 line for the gRNA4_U6_NOS_TET1CD_2xNLS_1xHA_sfGFP_scFv_UBQ10_INSULATOR_UBQ10_dCAS9_1xHA_3xNLS_10xGCN422aa_OCS (SunTag22aa-TET1-1) and two independent T1 lines for the gRNA4_U6_NOS_TET1CD_2xNLS_1xHA_sfGFP_scFv_UBQ10_INSULATOR_UBQ10_dCAS9_1xHA_3xNLS_10xGCN414aa_OCS (SunTag14aa-TET1-1 and SunTag14aa-TET1-2) construct. SunTag22aa-TET1, SunTag14aa-TET1 and wild-type Col-0 control plants were analysed by RNA-seq. RPKM fold change between wild-type Col-0 and SunTag22aa-TET1-1, SunTag14aa-TET1-1 or SunTag14aa-TET1-1is presented for the FWA gene and the control housekeeping genes PP2A and IPP2. The fold change value in expression of each gene in the indicated line as compared to Col-0 wild-type plants is indicated on top of each bar.

[0041] FIG. 15 illustrates a schematic of a SunTag targeting system that was used successfully to demethylate the CACTA1 promoter.

[0042] FIG. 16 illustrates quantitative real-time PCR results in a bar graph showing relative expression of CACTA1 over IPP2 in Col-0 and two T1 plants containing the CACTA1gRNA2_U6_NOS_TET1CD_2xNLS_1xHA_sfGFP_scFv_UBQ10_INSULATOR _UBQ10_dCAS9-1xHA_3xNLS_10xGCN422aa_OCS (SunTagCACTA1g2-22aa) transgene.

[0043] FIG. 17 illustrates Whole Genome Bisulfite Sequencing results. DNA methylation of two independent transgenic lines that carry the CACTA1gRNA2_U6_NOS_TET1CD_2xNLS_1xHA_sfGFP_scFv_UBQ10_INSULATOR _UBQ10_dCAS9-1xHA_3xNLS_10xGCN422aa_OCS (SunTagCACTA1g2-22aa) transgene were analyzed by BS-seq. Methylation levels in different contexts (CG, CHG and CHH, where H is C, T, or A) are shown for a wild-type Col-0 plant and the SunTag22aaCACTA1g2-22aa lines. A gray arrow indicates the gRNA binding site in the promoter region of CACTA1. A zoom in of the targeted region is shown (right).

[0044] FIG. 18 illustrates the methylation levels in the region comprising 200 bp upstream and downstream of the gRNA binding site in a bar graph for Col-0 and two T1 plants containing CACTA1gRNA2_U6_NOS_TET1CD_2xNLS_1xHA_sfGFP_scFv_UBQ10_INSULATOR _UBQ10_dCAS9_1xHA_3xNLS_10xGCN422aa_OCS (SunTagCACTA1g2-22aa) transgene.

[0045] FIG. 19 illustrates the genome-wide CG, CHG and CHH methylation levels in Col-0 and two T1 plants containing the CACTA1gRNA2_U6_NOS_TET1CD_2xNLS_1xHA_sfGFP_scFv_UBQ10_INSULATOR_UBQ10_dCAS9-1xHA_3xNLS_10xGCN422aa_OCS (SunTagCACTA1g2-22aa) transgene. Percent methylation is depicted on the Y-axis.

[0046] FIG. 20 illustrates a schematic of a SunTag targeting system that was used successfully to demethylate the ROS1 promoter.

[0047] FIG. 21 illustrates quantitative real-time PCR results in a bar graph showing relative expression of ROS1 over IPP2 in two Col-0 and one transgenic plant containing the ROS1gRNA2_U6_NOS_TET1CD_2xNLS_1xHA_sfGFP_scFv_UBQ10_INSULATOR_UBQ10_dCAS9_1xHA_3xNLS_10xGCN422aa_OCS (ROS1g2 SunTag22aa TET1cd) transgene.

[0048] FIG. 22 illustrates Whole Genome Bisulfite Sequencing results. DNA methylation of a wild-type Col-0 plant and a transgenic line that carries the ROS1gRNA2_U6_NOS_TET1CD_2xNLS_1xHA_sfGFP_scFv_UBQ10_INSULATOR_UBQ10_dCAS9_1xHA_3xNLS_10xGCN422aa_OCS (ROS1g2 SunTag22aa TET1cd) construct was analyzed by BS-seq. Methylation levels in different contexts (CG, CHG and CHH, where H is C, T, or A) are shown. The ROS1 promoter region is marked in a red box.

[0049] FIG. 23 illustrates a zoomed-out view of the Whole Genome Bisulfite Sequencing results presented in FIG. 22. DNA methylation of a wild-type Col-0 plant and a transgenic line that carries the ROS1gRNA2_U6_NOS_TET1CD_2xNLS_1xHA_sfGFP_scFv_UBQ10_INSULATOR_UBQ10_dCAS9_1xHA_3xNLS_10xGCN422aa_OCS (ROS1g2 SunTag22aa TET1cd) construct was analyzed by BS-seq. Methylation levels in different contexts (CG, CHG and CHH, where H is C, T, or A) are shown. The ROS1 promoter region is marked in a red box.

[0050] FIG. 24 illustrates RNA-seq analysis of one wild-type Col-0 plant, and T1 transgenic plants carrying either the pUBQ10::ZF1CACTA1_3xFlag_TET1CD or the pUBQ10::ZF2CACTA1_3xFlag_TET1CD transgene in a bar graph.

[0051] FIG. 25 illustrates Whole Genome Bisulfite Sequencing results. DNA methylation of one wild-type Col-0 plant and two independent transgenic lines that carry either the pUBQ10::ZF1CACTA1-3xFlag_TET1CD or the pUBQ10::ZF2CACTA1-3xFlag_TET1CD transgene were analyzed by BS-seq. Methylation levels at different contexts (CG, CHG and CHH, where H is C, T, or A) are shown. A red arrow indicates the ZF1CACTA1 binding site and a purple arrow indicates the ZF2CACTA1 binding site in the promoter region of CACTA1. A zoom in of the targeted region is shown (right).

[0052] FIG. 26 illustrates the methylation levels in the region comprising 200 bp upstream and downstream of either the ZF1CACTA1 or ZF2CACTA1 binding site in a bar graph for Col-0 and a T1 plant containing either the pUBQ10::ZF1CACTA1-3xFlag_TET1CD or the pUBQ10::ZF2CACTA1-3xFlag_TET1CD transgene.

[0053] FIG. 27 illustrates the genome-wide CG, CHG and CHH methylation levels in one wild-type Col-0 plant and a T1 plant containing either the pUBQ10::ZF1CACTA1-3xFlag_TET1CD or the pUBQ10::ZF2CACTA1-3xFlag_TET1CD transgene. Percent methylation is depicted on the Y-axis.

[0054] FIG. 28 illustrates a metaplot showing CG, CHG, and CHH methylation levels over all protein coding genes and TEs in one wild-type Col-0 plant and a T1 plant containing either the pUBQ10::ZF1CACTA1-3xFlag_TET1CD or the pUBQ10::ZF2CACTA1-3xFlag_TET1CD transgene.

[0055] FIG. 29 illustrates quantitative real-time PCR results in a bar graph showing relative expression of CACTA1 over IPP2 in one wild-type Col-0 plant and a T2 plant that has retained the pUBQ10::ZF1CACTA1-3xFlag_TET1CD transgene (+) and a T2 plant that has had the transgene segregated away (−).

[0056] FIG. 30 illustrates Whole Genome Bisulfite Sequencing results. DNA methylation of one wild-type Col-0 plant and T2 plants that have either retained the pUBQ10::ZF1CACTA1-3xFlag_TET1CD or the pUBQ10::ZF2CACTA1_3xFlag_TET1CD transgene (+), or have had the transgene segregated away (−) were analyzed by BS-seq. Methylation levels at different contexts (CG, CHG and CHH, where H is C, T, or A) are shown. A red arrow indicates the ZF1 binding site and a blue arrow indicates the ZF2 binding site in the promoter region of CACTA1. A zoom in of the targeted region is shown (right).

[0057] FIG. 31 illustrates the methylation levels in the region comprising 200 bp upstream and downstream of the ZF1CACTA1 binding site in a bar graph for one wild-type Col-0 plant and a T2 plant that has retained the pUBQ10::ZF1CACTA1-3xFlag_TET1CD transgene (+) and a T2 plant that has had the transgene segregated away (−).

[0058] FIG. 32 illustrates the genome-wide CG, CHG and CHH methylation levels in one wild-type Col-0 plant and T2 plants that have either retained the pUBQ10::ZF1CACTA1_3xFlag_TET1CD or the pUBQ10::ZF2CACTA1-3xFlag_TET1CD transgene (+), or have had the transgene segregated away (−). Percent methylation is depicted on the Y-axis.

[0059] FIG. 33 illustrates a metaplot showing CG, CHG, and CHH methylation levels over all protein coding genes and TEs in one wild-type Col-0 plant and T2 plants that have either retained the pUBQ10::ZF1CACTA1-3xFlag_TET1CD or the pUBQ10::ZF2CACTA1_3xFlag_TET1CD transgene (+), or have had the transgene segregated away (−).

[0060] FIG. 34 illustrates RNA-seq analysis of one wild-type Col-0 plant and two independent T1 transgenic plants carrying the pUBQ10::ZF1ROS1_3xFlag_TET1cd transgene in a bar graph. RPKM values are indicated.

[0061] FIG. 35 illustrates Whole Genome Bisulfite Sequencing results. DNA methylation of one wild-type Col-0 plant and two independent T1 transgenic plants carrying the pUBQ10::ZF1ROS1_3xFlag_TET1cd transgene were analyzed by BS-seq. Methylation levels at different contexts (CG, CHG and CHH, where H is C, T, or A) are shown. A blue arrow indicates the ZF1 binding site in the promoter region of ROS1. A zoom in of the targeted region is shown (right).

[0062] FIG. 36 illustrates the methylation levels in the region comprising 200 bp upstream and downstream of the ZF1ROS1 binding site in a bar graph of one wild-type Col-0 plant and two independent T1 transgenic plants carrying the pUBQ10::ZF1ROS1_3xFlag_TET1cd transgene.

[0063] FIG. 37 illustrates the genome-wide CG, CHG and CHH methylation levels in Col-0 and two independent T1 transgenic plants carrying the pUBQ10::ZF1ROS1_3xFlag_TET1cd transgene. Percent methylation is depicted on the Y-axis.

[0064] FIG. 38 illustrates a metaplot showing CG, CHG, and CHH methylation levels over all protein coding genes and TEs of one wild-type Col-0 plant and two independent T1 transgenic plants carrying the pUBQ10::ZF1ROS1_3xFlag_TET1cd transgene.

[0065] FIG. 39 illustrates RNA-seq analysis of five Col-0 wild-type plants, fwa-4, two independent T1 lines for the gRNA4_U6_NOS_TET1CD_2xNLS_1xHA_sfGFP_scFv_UBQ10_INSULATOR_UBQ10_dCAS9_1xHA_3xNLS_10xGCN422aa_OCS (SunTag FWAg4-22aa-TET1) transgene, and two independent T1 lines for the gRNA4_U6_NOS_TET1CD_2xNLS_1xHA_sfGFP_scFv_UBQ10_INSULATOR_UBQ10_dCAS9_1xHA_3xNLS_10xGCN414aa_OCS (SunTag FWAg4-14aa-TET1) transgene displayed in a bar graph.

[0066] FIG. 40 illustrates Whole Genome Bisulfite Sequencing results. DNA methylation of one wild-type Col-0 plant and a late flowering transgenic line that carries the gRNA4_U6_NOS_TET1CD_2xNLS_1xHA_sfGFP_scFv_UBQ10_INSULATOR_UBQ10_dCAS9_1xHA_3xNLS_10xGCN422aa_OCS (SunTagFWAg4-22aa) transgene was analyzed by BS-seq. Methylation levels of different contexts (CG, CHG and CHH, where H is C, T, or A) are shown. A gray arrow indicates the gRNA4 binding site in the promoter region of FWA.

[0067] FIG. 41 illustrates a zoomed-out view of the Whole Genome Bisulfite Sequencing results presented in FIG. 40. DNA methylation of one wild-type Col-0 plant and a late flowering transgenic line that carries the gRNA4_U6_NOS_TET1CD_2xNLS_1xHA_sfGFP_scFv_UBQ10_INSULATOR_UBQ10_dCAS9_1xHA_3xNLS_10xGCN422aa_OCS (SunTagFWAg4-22aa) construct was analyzed by BS-seq. Methylation levels of different contexts (CG, CHG and CHH, where H is C, T, or A) are shown. A gray arrow indicates the gRNA4 binding site in the promoter region of FWA.

[0068] FIG. 42 illustrates the flowering time of Col-0, fwa-4, and the segregating populations of T2 plants that have arisen from T1 plants containing either the gRNA4_U6_NOS_TET1CD_2xNLS_1xHA_sfGFP_scFv_UBQ10_INSULATOR_UBQ10_dCAS9_1xHA_3xNLS_10xGCN422aa_OCS or gRNA4_U6_NOS_TET1CD_2xNLS_1xHA_sfGFP_scFv_UBQ10_INSULATOR_UBQ10_dCAS9_1xHA_3xNLS_10xGCN414aa_OCS transgene.

[0069] FIG. 43 illustrates Whole Genome Bisulfite Sequencing results. DNA methylation of T2 plants that have either retained the gRNA4_U6_NOS_TET1CD_2xNLS_1xHA_sfGFP_scFv_UBQ10_INSULATOR_UBQ10_dCAS9_1xHA_3xNLS_10xGCN422aa_OCS or the gRNA4_U6_NOS_TET1CD_2xNLS_1xHA_sfGFP_scFv_UBQ10_INSULATOR_UBQ10_dCAS9_1xHA_3xNLS_10xGCN414aa_OCS transgene (+) or have had the transgenes segregated away (−) were analyzed by BS-seq. Methylation levels of different contexts (CG, CHG and CHH, where H is C, T, or A) are shown. A gray arrow indicates the gRNA4 binding site in the promoter region of FWA.

[0070] FIG. 44 illustrates Whole Genome Bisulfite Sequencing results. DNA methylation of T2 plants that have either retained the gRNA4_U6_NOS_TET1CD_2xNLS_1xHA_sfGFP_scFv_UBQ10_INSULATOR_UBQ10_dCAS9_1xHA_3xNLS_10xGCN422aa_OCS transgene (+) or have had the transgene segregated away (−) was analyzed by BS-seq. Methylation levels of different contexts (CG, CHG and CHH, where H is C, T, or A) are shown. A gray arrow indicates the gRNA4 binding site in the promoter region of FWA.

[0071] FIG. 45 illustrates a zoomed-out view of the Whole Genome Bisulfite Sequencing results presented in FIG. 43 and FIG. 44. DNA methylation of T2 plants that have either retained the gRNA4_U6_NOS_TET1CD_2xNLS_1xHA_sfGFP_scFv_UBQ10_INSULATOR_UBQ10_dCAS9_1xHA_3xNLS_10xGCN422aa_OCS or the gRNA4_U6_NOS_TET1CD_2xNLS_1 xHA_sfGFP_scFv_UBQ10_INSULATOR_UBQ10_dCAS9_1xHA_3xNLS_10xGCN414aa_OCS transgene (+), or have had the transgene segregated away (−) were analyzed by BS-seq. Methylation levels of different contexts (CG, CHG and CHH, where H is C, T, or A) are shown. A gray arrow indicates the gRNA4 binding site in the promoter region of FWA.

[0072] FIG. 46 illustrates the genome-wide CG methylation levels in Col-0, T1 and T2 plants that contain either the gRNA4_U6_NOS_TET1CD_2xNLS_1xHA_sfGFP_scFv_UBQ10_INSULATOR_UBQ10_dCAS9_1xHA_3xNLS_10xGCN422aa_OCS or the gRNA4_U6_NOS_TET1CD_2xNLS_1xHA_sfGFP_scFv_UBQ10_INSULATOR_UBQ10_dCAS9_1xHA_3xNLS_10xGCN414aa_OCS transgene (+), and T2 plants where either the gRNA4_U6_NOS_TET1CD_2xNLS_1xHA_sfGFP_scFv_UBQ10_INSULATOR_UBQ10_dCAS9_1xHA_3xNLS_10xGCN422aa_OCS or the gRNA4_U6_NOS_TET1CD_2xNLS_1xHA_sfGFP_scFv_UBQ10_INSULATOR_UBQ10_dCAS9_1xHA_3xNLS_10xGCN414aa_OCS transgene has been segregated away in the T2 (−).

[0073] FIG. 47 illustrates the genome-wide CHG and CHH methylation levels in one wild-type Col-0 plant and T1 plants that contain either the gRNA4_U6_NOS_TET1CD_2xNLS_1xHA_sfGFP_scFv_UBQ10_INSULATOR_UBQ10_dCAS9_1xHA_3xNLS_10xGCN422aa_OCS or the gRNA4_U6_NOS_TET1CD_2xNLS_1xHA_sfGFP_scFv_UBQ10_INSULATOR_UBQ10_dCAS9_1xHA_3xNLS_10xGCN414aa_OCS transgene.

[0074] FIG. 48 illustrates the genome-wide CHG and CHH methylation levels in one wild-type Col-0 plant and T2 plants that contain either the gRNA4_U6_NOS_TET1CD_2xNLS_1xHA_sfGFP_scFv_UBQ10_INSULATOR_UBQ10_dCAS9_1xHA_3xNLS_10xGCN422aa_OCS or the gRNA4_U6_NOS_TET1CD_2xNLS_1xHA_sfGFP_scFv_UBQ10_INSULATOR_UBQ10_dCAS9_1xHA_3xNLS_10xGCN414aa_OCS transgene (+), or plants that had segregated away the transgenes (−).

[0075] FIG. 49 illustrates the genome-wide CG, CHG and CHH methylation levels in one wild-type Col-0 plant and a T2 plant that contains the gRNA4_U6_NOS_TET1CD_2xNLS_1 xHA_sfGFP_scFv_UBQ10_INSULATOR_UBQ10_dCAS9_1xHA_3xNLS_10xGCN422aa_OCS transgene (+) or a T2 plant where the gRNA4_U6_NOS_TET1CD_2xNLS_1xHA_sfGFP_scFv_UBQ10_INSULATOR_UBQ10_dCAS9_1xHA_3xNLS_10xGCN422aa_OCS transgene has been segregated away in the T2 (−).

[0076] FIG. 50A-FIG. 50B illustrate flowering time data. FIG. 50A illustrates the flowering time of Col-0, fwa-4, and a population of T1 plants with ZF108-TET1cd. FIG. 50B illustrates the flowering time data of Col-0, fwa-4, T3 plants from 3 independent lines containing pUBQ10_ZF108_3xFlag_YPct and T3 plants from 3 independent lines that have either retained the pUBQ10::ZF108_3xFlag_TET1-CD transgene (+) or plants where the pUBQ10::ZF108_3xFlag_TET1-CD transgene was segregated away (−).

[0077] FIG. 51A-FIG. 51B illustrate RNA-seq analysis data. FIG. 51A illustrates RNA-seq data of one wild-type Col-0 plant, an fwa-4 plant, and four independent T1 plants expressing the pUBQ10::ZF108_3xFlag_TET1-CD transgene with a bar graph of RPKM values (RPKM+1). FIG. 51B illustrates RNA-seq data of four replicates of Col-0 wild-type plants, four replicates from T3 plants from two independent lines containing pUBQ10::ZF108_3xFlag_YPet, and four replicates from T3 plants from two independent lines containing the pUBQ10::ZF108_3xFlag_TET1-CD transgene in a bar graph of RPKM values (RPKM+1).

[0078] FIG. 52 illustrates a scatterplot of RNA-seq data comparing gene expression of ZF108-TET1cd lines and ZF108-YPet lines. Values were calculated using four biological replicates of two independent lines for ZF108-TET1cd and ZF108-YPet. Gray dots indicate non-differentially expressed genes. Blue dots indicate differentially expressed genes. A 4-fold change and FDR less than 0.05 was used as a cutoff. FWA expression is highlighted in red.

[0079] FIG. 53 illustrates Whole Genome Bisulfite Sequencing results. DNA methylation levels of one wild-type Col-0 plant and late flowering T3 transgenic line that have either retained the pUBQ10::ZF108_3xFlag_TET1-CD transgene (+) or where the transgene had been segregated away (−) were analyzed by BS-seq. Methylation levels at different contexts (CG, CHG and CHH, where H is C, T, or A) are shown. The black triangles indicate the ZF108 binding sites in the promoter region of FWA.

[0080] FIG. 54 illustrates Whole Genome Bisulfite Sequencing results. DNA methylation levels of one wild-type Col-0 plant and late flowering T3 transgenic lines that have either retained the pUBQ10::ZF108_3xFlag_TET1-CD transgene (+) or where the transgene had been segregated away (−) were analyzed by BS-seq. Methylation levels of different contexts (CG, CHG and CHH, where H is C, T, or A) are shown for a wild-type Col-0 plant and plants that have either retained the pUBQ10::ZF108_3xFlag_TET1-CD transgene or where the transgene had been segregated away. The black triangles indicate the ZF108 binding sites in the promoter region of FWA.

[0081] FIG. 55 illustrates a zoomed-out view of the Whole Genome Bisulfite Sequencing results presented in FIG. 53 and FIG. 54. DNA methylation levels of one wild-type Col-0 plant and two late flowering T3 transgenic lines that have either retained the pUBQ10::ZF108_3xFlag_TET1-CD transgene (+) or where the transgene had been segregated away (−) were analyzed by BS-seq. Methylation levels at different contexts (CG, CHG and CHH, where H is C, T, or A) are shown. The blue triangle indicates the ZF108 binding sites in the promoter region of FWA.

[0082] FIG. 56 illustrates the genome-wide CG methylation levels in Col-0 plants, four independent T1 plants containing the pUBQ10::ZF108_3xFlag_TET1-CD transgene, a T3 plant that retained the pUBQ10::ZF108_3xFlag_TET1-CD transgene (+) and a T3 plant that has had the transgene segregated away (−). Percent methylation is depicted on the Y-axis.

[0083] FIG. 57 illustrates the genome-wide CHG and CHH methylation levels in Col-0 plants and four independent T1 plants containing the pUBQ10::ZF108_3xFlag_TET1-CD transgene. Percent methylation is depicted on the Y-axis.

[0084] FIG. 58 illustrates the genome-wide CHG and CHH methylation levels in one wild-type Col-0 plant, a T3 plant that retained the pUBQ10::ZF108_3xFlag_TET1-CD transgene (+) and a T3 plant that has had the transgene segregated away (−). Percent methylation is depicted on the Y-axis.

[0085] FIG. 59 illustrates the genome-wide CG, CHG and CHH methylation levels in one wild-type Col-0 plant and a plant that retained the pUBQ10::ZF108_3xFlag_TET1-CD transgene (+) and a T3 plant that has had the transgene segregated away (−) from another T3 line. Percent methylation is depicted on the Y-axis.

[0086] FIG. 60 illustrates a metaplot showing CG, CHG, and CHH methylation levels over all protein coding genes and TEs in one wild-type Col-0 plant, a T3 plant that retained the pUBQ10::ZF108_3xFlag_TET1-CD transgene (+) and a T3 plant that has had the transgene segregated away (−).

[0087] FIG. 61 illustrates a schematic of a SunTag targeting system without a specific guide RNA for expression in Arabidopsis.

[0088] FIG. 62 illustrates the flowering time of Col-0, fwa-4 and T1 plants containing either the NOS_TET1CD_2xNLS_1xHA_sfGFP_scFv_UBQ10_INSULATOR_UBQ10_dCAS9_1xHA_3xNLS_10xGCN422aa_OCS or NOS_TET1CD_2xNLS_1xHA_sfGFP_scFv_UBQ10_INSULATOR_UBQ10_dCAS9_1xHA_3xNLS_10xGCN414aa_OCS transgene.

[0089] FIG. 63 illustrates Whole Genome Bisulfite Sequencing results. DNA methylation levels of one wild-type Col-0 plant and two independent T1 plants containing the NOS_TET1CD_2xNLS_1xHA_sfGFP_scFv_UBQ10_INSULATOR_UBQ10_dCAS9_1xHA_3xNLS_10xGCN422aa_OCS or NOS_TET1CD_2xNLS_1 xHA_sfGFP_scFv_UBQ10_INSULATOR_UBQ10_dCAS9_1xHA_3xNLS_10xGCN414aa_OCS transgene were analyzed by BS-seq. Methylation levels of different contexts (CG, CHG and CHH, where H is C, T, or A) over an area that includes the FWA promoter are shown.

[0090] FIG. 64 illustrates Whole Genome Bisulfite Sequencing results. DNA methylation levels of one wild-type Col-0 plant and two independent T1 plants containing the NOS_TET1CD_2xNLS_1 xHA_sfGFP_scFv_UBQ10_INSULATOR_UBQ10_dCAS9_1xHA_3xNLS_10xGCN422aa_OCS transgene were analyzed by BS-seq. Methylation levels of different contexts (CG, CHG and CHH, where H is C, T, or A) over an area that includes the CACTA1 promoter are shown.

[0091] FIG. 65 illustrates the genome-wide CG, CHG and CHH methylation levels of one wild-type Col-0 plant and two independent T1 plants containing the NOS_TET1CD_2xNLS_1xHA_sfGFP_scFv_UBQ10_INSULATOR_UBQ10_dCAS9_1xHA_3xNLS_10xGCN422aa_OCS or NOS_TET1CD_2xNLS_1xHA_sfGFP_scFv_UBQ10_INSULATOR_UBQ10_dCAS9_1xHA_3xNLS_10xGCN414aa_OCS transgene.

[0092] FIG. 66A-FIG. 66B illustrates an alignment of the catalytic domain of human TETI, TET2, and TET3. Yellow highlighting shows the Cys-rich domain: likely to chelate two or more Zn2+ ions via nine conserved Cys residues and one His residue. It has been postulated to be part of a DNA-binding surface that might help in target recognition (Pastor et al, 2013, Nature Rev Mol Cell Biol, June; 14(6): 341-356). Grey indicates the invariant P causing a kink, a unique feature of TET family. Purple highlighting indicates the dioxygenase domain. Pink indicates the His-Xaa-Asp (where Xaa is any amino acid) (SEQ ID NO: 189) and C-term His: involved in coordinating Fe2+. The blue R residue binds to oxoglutarate via a salt bridge. Red lining above amino acid sequences indicates the CTD-like region within the DSBH domain. Purple indicates the active sites.

[0093] FIG. 67 illustrates an alignment of the Cys-rich domain of TET1, TET2, and TET3.

[0094] FIG. 68 illustrates an alignment of double-stranded B-helix (DSBH) fold/Dioxygenase Domain of TET1, TET2, and TET3.

### DETAILED DESCRIPTION

### Overview

[0095] The following description is presented to enable a person of ordinary skill in the art to make and use the various embodiments. Descriptions of specific devices, techniques, methods, and applications are provided only as examples. Various modifications to the examples described herein will be readily apparent to those of ordinary skill in the art, and the general principles defined herein may be applied to other examples and applications without departing from the spirit and scope of the various embodiments. Thus, the various embodiments are not intended to be limited to the examples described herein and shown, but are to be accorded the scope consistent with the claims.

[0096] The present disclosure relates to the use of recombinant proteins for inducing epigenetic modifications at specific loci, as well as to methods of using these recombinant proteins for modulating the expression of genes in plants.

[0097] Specifically, the present disclosure relates to the compositions and methods for targeting recombinant TET proteins (e.g. TET1 proteins) to specific nucleic acids in plants to reduce methylation of the target nucleic acid.

[0098] The present disclosure is based, at least in part, on Applicant's discovery that the catalytic domain of a human TET1 protein, when recombinantly fused to a DNA-binding domain that targets a specific nucleic acid, could be targeted to and induce DNA de-methylation at the targeted nucleic acid in plants. The targeted nucleic acid exhibited a reduced level of methylation and an increased level of expression as compared to corresponding controls. This technology could be used to selectively induce DNA de-methylation at targeted nucleic acids in plants and to create novel expression based traits for crop improvement.

[0099] Accordingly, the present disclosure provides methods and compositions for reducing methylation of a target nucleic acid in a plant by targeting a TET polypeptide (e.g. TET1 polypeptide) or fragment thereof to a target nucleic acid. Plants may be grown under conditions such that the TET polypeptide (e.g. TET1 polypeptide) or fragment thereof is targeted to the target nucleic acid, thereby reducing methylation of the target nucleic acid.

[0100] In some embodiments, the TET polypeptide (e.g. TET1 polypeptide) or fragment thereof has been engineered to specifically bind different DNA sequences via the introduction of a heterologous DNA-binding domain into the protein such as, for example, a heterologous zinc finger domain or TAL effector targeting domain. The heterologous DNA-binding domain directly facilitates targeting the TET1 polypeptide to the target nucleic acid to induce de-methylation.

[0101] In some embodiments, the TET polypeptide (e.g. TET1 polypeptide) or fragment thereof can be targeted to a specific locus of interest using a CRISPR-CAS9 targeting system. CRISPR-CAS9 systems involve the use of a CRISPR RNA (crRNA), a trans-activating CRISPR RNA (tracrRNA), and a CAS9 protein. The crRNA and tracrRNA aid in directing the CAS9 protein to a target nucleic acid sequence, and these RNA molecules can be specifically engineered to target specific nucleic acid sequences. In particular, certain aspects of the present disclosure involve the use of a single guide RNA (gRNA) that reconstitutes the function of the crRNA and the tracrRNA. Further, certain aspects of the present disclosure involve a CAS9 protein that does not exhibit DNA cleavage activity (dCAS9). As disclosed herein, gRNA molecules may be used to direct the dCAS9 protein to a target nucleic acid sequence. By recombinantly fusing a TET polypeptide (e.g. TET1 polypeptide) or fragment thereof of the present disclosure to a dCAS9 protein, use of the CRISPR targeting system allows for delivering the TET polypeptide (e.g. TET1 polypeptide) directly to a target nucleic acid.

[0102] Accordingly, the present disclosure provides methods for CRISPR-targeting of a TET polypeptide (e.g. TET1 polypeptide) to a specific locus to reduce methylation of the target locus. The TET polypeptide (e.g. TET1 polypeptide) may be recombinantly fused to a CAS9 protein, such as a nuclease-deficient CAS9 protein. The methods of the present disclosure also involve the use of a crRNA and tracrRNA to interact with the target nucleic acid. The crRNA and tracrRNA directs the recombinant protein of the present disclosure fused to a CAS9 protein to the target nucleic acid, thereby facilitating de-methylation of the target nucleic acid.

[0103] Accordingly, certain aspects of the present disclosure relate to targeting a TET-like protein (e.g. TET1-like protein) to a target nucleic acid. TET-like proteins (e.g. TET1-like proteins), or a fragment of the full-length coding sequence thereof, may contain a heterologous DNA-binding domain directly facilitates targeting the TET polypeptide (e.g. TET1 polypeptide) to the target nucleic acid to induce de-methylation. TET-like proteins (e.g. TET1-like proteins), or a fragment of the full-length coding sequence thereof, may contain a heterologous coding sequence that encodes a protein involved in the targeting and/or recruitment of the TET polypeptide (e.g. TET1 polypeptide) to a target nucleic acid via the CRISPR-CAS9 system. The TET polypeptide (e.g. TET1 polypeptide) portion of a TET-like protein (e.g. TET1-like protein) may be present in various N-terminal or C-terminal orientations relative to the heterologous coding sequence present in a TET-like protein (e.g. TET1-like protein).

[0104] The use of the terms “a,” “an,” and “the,” and similar referents in the context of describing the disclosure (especially in the context of the following claims) are to be construed to cover both the singular and the plural, unless otherwise indicated herein or clearly contradicted by context. The terms “comprising,” “having,” “including,” and “containing” are to be construed as open-ended terms (i.e., meaning “including, but not limited to,”) unless otherwise noted. Recitation of ranges of values herein are merely intended to serve as a shorthand method of referring individually to each separate value falling within the range, unless otherwise indicated herein, and each separate value is incorporated into the specification as if it were individually recited herein. For example, if the range 10-15 is disclosed, then 11, 12, 13, and 14 are also disclosed. All methods described herein can be performed in any suitable order unless otherwise indicated herein or otherwise clearly contradicted by context. The use of any and all examples, or exemplary language (e.g., “such as”) provided herein, is intended merely to better illuminate the embodiments of the disclosure and does not pose a limitation on the scope of the disclosure unless otherwise claimed. No language in the specification should be construed as indicating any non-claimed element as essential to the practice of the embodiments of the disclosure.

[0105] Reference to “about” a value or parameter herein refers to the usual error range for the respective value readily known to the skilled person in this technical field. Reference to “about” a value or parameter herein includes (and describes) aspects that are directed to that value or parameter per se. For example, description referring to “about X” includes description of “X.”

[0106] It is understood that aspects and embodiments of the present disclosure described herein include “comprising,” “consisting,” and “consisting essentially of” aspects and embodiments.

[0107] It is to be understood that one, some, or all of the properties of the various embodiments described herein may be combined to form other embodiments of the present disclosure. These and other aspects of the present disclosure will become apparent to one of skill in the art. These and other embodiments of the present disclosure are further described by the detailed description that follows.

[0108] The terms “isolated” and “purified” as used herein refers to a material that is removed from at least one component with which it is naturally associated (e.g., removed from its original environment). The term “isolated,” when used in reference to an isolated protein, refers to a protein that has been removed from the culture medium of the host cell that expressed the protein. As such an isolated protein is free of extraneous or unwanted compounds (e.g., nucleic acids, native bacterial or other proteins, etc.).

### DNA-Binding Domains

[0109] Certain aspects of the present disclosure relate to TET-like proteins (e.g. TET1-like proteins) that have DNA-binding activity. In some embodiments, this DNA-binding activity is achieved through a heterologous DNA-binding domain (e.g. binds with a sequence affinity other than that of a DNA-binding domain that may be present in the endogenous protein). In some embodiments, TET-like proteins (e.g. TET1-like proteins) of the present disclosure contain a DNA-binding domain. TET-like proteins (e.g. TET1-like proteins) of the present disclosure may contain one DNA binding domain or they may contain more than one DNA-binding domain. Heterologous DNA-binding domains may be recombinantly fused to a TET protein (e.g. TET1 protein) of the present disclosure such that the resulting TET-like protein (e.g. TET1-like protein) is then targeted to a specific nucleic acid sequence and can induce demethylation of the specific nucleic acid sequence.

[0110] In some embodiments, the DNA-binding domain is a zinc finger domain. A zinc finger domain generally refers to a DNA-binding protein domain that contains zinc fingers, which are small protein structural motifs that can coordinate one or more zinc ions to help stabilize their protein folding. Zinc fingers were first identified as DNA-binding motifs (Miller et al., 1985), and numerous other variations of them have been characterized. Progress has been made that allows the engineering of DNA-binding proteins that specifically recognize any desired DNA sequence. For example, it was shown that a three-finger zinc finger protein could be constructed to block the expression of a human oncogene that was transformed into a mouse cell line (Choo and Klug, 1994).

[0111] Zinc fingers can generally be classified into several different structural families and typically function as interaction modules that bind DNA, RNA, proteins, or small molecules. Suitable zinc finger domains of the present disclosure may contain two, three, four, five, six, seven, eight, or nine zinc fingers. Examples of suitable zinc finger domains may include, for example, Cys2His2 (C2H2) zinc finger domains, C-x8-C-x5-C-x3-H (CCCH) zinc finger domains, multi-cysteine zinc finger domains, and zinc binuclear cluster domains.

[0112] In some embodiments, the DNA-binding domain binds a specific nucleic acid sequence. For example, the DNA-binding domain may bind a sequence that is at least 5 nucleotides, at least 6 nucleotides, at least 7 nucleotides, at least 8 nucleotides, at least 9 nucleotides, at least 10 nucleotides, at least 11 nucleotides, at least 12 nucleotides, at least 13 nucleotides, at least 14 nucleotides, at least 15 nucleotides, at least 20 nucleotides, at least 25 nucleotides, at least 30 nucleotides, at least 35 nucleotides, at least 40 nucleotides, at least 45 nucleotides, at least 50 nucleotides, or a high number of nucleotides in length.

[0113] In some embodiments, a recombinant protein of the present disclosure further contains two N-terminal CCCH zinc finger domains.

[0114] In some embodiments, the zinc finger domain is an engineered zinc finger array, such as a C2H2 zinc finger array. Engineered arrays of C2H2 zinc fingers can be used to create DNA-binding proteins capable of targeting desired genomic DNA sequences. Methods of engineering zinc finger arrays are well known in the art, and include, for example, combining smaller zinc fingers of known specificity.

[0115] In some embodiments, recombinant proteins of the present disclosure may contain a DNA-binding domain other than a zinc finger domain. Examples of such DNA-binding domains may include, for example, TAL (transcription activator-like) effector targeting domains, helix-turn-helix family DNA-binding domains, basic domains, ribbon-helix-helix domains, TBP (TATA-box binding protein) domains, barrel dimer domains, RHB domains (real homology domain), BAH (bromo-adjacent homology) domains, SANT domains, Chromodomains, Tudor domains, Bromodomains, PHD domains (plant homeo domain), WD40 domains, and MBD domains (methyl-CpG-binding domain).

[0116] In some embodiments, the DNA-binding domain is a TAL effector targeting domain. TAL effectors generally refer to secreted bacterial proteins, such as those secreted by Xanthomonas or Ralstonia bacteria when infecting various plant species. Generally, TAL effectors are capable of binding promoter sequences in the host plant, and activate the expression of plant genes that aid in bacterial infection. TAL effectors recognize plant DNA sequences through a central repeat targeting domain that contains a variable number of approximately 34 amino acid repeats. Moreover, TAL effector targeting domains can be engineered to target specific DNA sequences. Methods of modifying TAL effector targeting domains are well known in the art, and described in Bogdanove and Voytas, Science. 2011 Sep. 30; 333(6051):1843-6.

[0117] Other DNA-binding domains for use in the methods and compositions of the present disclosure will be readily apparent to one of skill in the art, in view of the present disclosure.

### CRISPR-CAS9

[0118] Certain methods of the present disclosure relate to using a CRISPR-CAS9 targeting system to target a TET protein (e.g. TET1 protein) to a target nucleic acid and induce demethylation of the target nucleic acid.

[0119] CRISPR systems naturally use small base-pairing guide RNAs to target and cleave foreign DNA elements in a sequence-specific manner (Wiedenheft et al., 2012). There are diverse CRISPR systems in different organisms that may be used to target proteins of the present disclosure to a target nucleic acid. One of the simplest systems is the type II CRISPR system from Streptococcus pyogenes. Only a single gene encoding the CAS9 protein and two RNAs, a mature CRISPR RNA (crRNA) and a partially complementary trans-acting RNA (tracrRNA), are necessary and sufficient for RNA-guided silencing of foreign DNAs (Jinek et al., 2012). Maturation of crRNA requires tracrRNA and RNase III (Deltcheva et al., 2011). However, this requirement can be bypassed by using an engineered small guide RNA (gRNA) containing a designed hairpin that mimics the tracrRNA-crRNA complex (Jinek et al., 2012). Base pairing between the gRNA and target DNA normally causes double-strand breaks (DSBs) due to the endonuclease activity of CAS9.

[0120] It is known that the endonuclease domains of the CAS9 protein can be mutated to create a programmable RNA-dependent DNA-binding protein (dCAS9) (Qi et al., 2013). The fact that duplex gRNA-dCAS9 binds target sequences without endonuclease activity has been used to tether regulatory proteins, such as transcriptional activators or repressors, to promoter regions in order to modify gene expression (Gilbert et al., 2013), and CAS9 transcriptional activators have been used for target specificity screening and paired nickases for cooperative genome engineering (Mali et al., 2013, Nature Biotechnology 31:833-838). Thus, dCAS9 may be used as a modular RNA-guided platform to recruit different proteins to DNA in a highly specific manner. One of skill in the art would recognize other RNA-guided DNA binding protein/RNA complexes that can be used equivalently to CRISPR-CAS9.

[0121] The CRISPR-CAS9 system may be used to target a TET1 protein of the present disclosure to a specific nucleic acid. Targeting using CRISPR-CAS9 may be beneficial over other genome targeting techniques in certain instances. For example, one need only change the guide RNAs in order to target fusion proteins to a new genomic location, or even multiple locations simultaneously. In addition, guide RNAs can be extended to include sites for binding to proteins, such as the MS2 protein, which can be fused to proteins of interest.

[0122] CAS9 Proteins

[0123] A variety of CAS9 proteins may be used in the methods of the present disclosure. There are several CAS9 genes present in different bacteria species (Esvelt, K et al, 2013, Nature Methods). One of the most characterized CAS9 proteins is the CAS9 protein from S. pyogenes that, in order to be active, needs to bind a gRNA with a specific sequence and the presence of a PAM motif (NGG, where N is any nucleotide) at the 3′ end of the target locus. However, other CAS9 proteins from different bacterial species show differences in 1) the sequence of the gRNA they can bind and 2) the sequence of the PAM motif. Therefore, it is possible that other CAS9 proteins such as, for example, those from Streptococcus thermophilus or N. meningitidis may also be utilized herein. Indeed, these two CAS9 proteins have a smaller size (around 1100 amino acids) as compared to S. pyogenes CAS9 (1400 amino acids), which may confer some advantages during cloning or protein expression.

[0124] CAS9 proteins from a variety of bacteria have been used successfully in engineered CRISPR-CAS9 systems. There are also versions of CAS9 proteins available in which the codon usage has been more highly optimized for expression in eukaryotic systems, such as human codon optimized CAS9 (Cell, 152:1173-1183) and plant optimized CAS9 (Nature Biotechnology, 31:688-691).

[0125] CAS9 proteins may also be modified for various purposes. For example, CAS9 proteins may be engineered to contain a nuclear-localization sequence (NLS). CAS9 proteins may be engineered to contain an NLS at the N-terminus of the protein, at the C-terminus of the protein, or at both the N- and C-terminus of the protein. Engineering a CAS9 protein to contain an NLS may assist with directing the protein to the nucleus of a host cell. CAS9 proteins may be engineered such that they are unable to cleave nucleic acids (e.g. nuclease-deficient dCAS9 polypeptides). One of skill in the art would be able to readily identify a suitable CAS9 protein for use in the methods and compositions of the present disclosure.

[0126] Exemplary CAS9 proteins that may be used in the methods and compositions of the present disclosure may include, for example, a CAS9 protein having the amino acid sequence of any one of SEQ ID NO: 15, SEQ ID NO: 16, and/or SEQ ID NO: 17, homologs thereof, and fragments thereof.

[0127] In some embodiments, a CAS9 polypeptide or fragment thereof of the present disclosure has an amino acid sequence with at least about 20%, at least about 25%, at least about 30%, at least about 40%, at least about 50%, at least about 55%, at least about 60%, at least about 65%, at least about 70%, at least about 75%, at least about 80%, at least about 85%, at least about 90%, at least about 91%, at least about 92%, at least about 93%, at least about 94%, at least about 95%, at least about 96%, at least about 97%, at least about 98%, at least about 99%, or at least about 100% amino acid identity to the amino acid sequence of SEQ ID NO: 15, SEQ ID NO: 16, SEQ ID NO: 17, or SEQ ID NO: 125. In some embodiments, the CAS9 polypeptide does not have nuclease activity and is unable to cleave a nucleic acid molecule (e.g. dCAS9 polypeptide).

[0128] CRISPR RNAs

[0129] The CRISPR RNA (crRNA) of the present disclosure may take a variety of forms. As described above, the sequence of the crRNA is involved in conferring specificity to targeting a specific nucleic acid.

[0130] Many different crRNA molecules can be designed to target many different sequences. With respect to targeting, target nucleic acids generally require the PAM sequence, NGG, at the end of the 20 base pair target sequence. crRNAs of the present disclosure may be expressed as a single crRNA molecule, or they may be expressed in the form of a crRNA/tracrRNA hybrid molecule where the crRNA and the tracrRNA have been fused together, forming a guide RNA (gRNA). crRNA molecules and/or guide RNA molecules may be extended to include sites for the binding of RNA binding proteins.

[0131] Multiple crRNAs and/or guide RNAs can be encoded into a single CRISPR array to enable simultaneous targeting to several sites (Science 2013: Vol. pp. 819-823). For example, the tracrRNA may be expressed separately, and two adjacent target sequences may be encoded in a pre-crRNA array interspaced with repeats.

[0132] A variety of promoters may be used to drive expression of the crRNA and/or the guide RNA. crRNAs and/or guide RNAs may be expressed using a Pol III promoter such as, for example, the U6 promoter or the HI promoter (eLife 2013 2:e00471). For example, an approach in plants has been described using three different Pol III promoters from three different Arabidopsis U6 genes, and their corresponding gene terminators (BMC Plant Biology 2014 14:327). One skilled in the art would readily understand that many additional Pol III promoters could be utilized to simultaneously express many crRNAs and/or guide RNAs to many different locations in the genome simultaneously. The use of different Pol III promoters for each crRNA and/or gRNA expression cassette may be desirable to reduce the chances of natural gene silencing that can occur when multiple copies of identical sequences are expressed in plants. In addition, crRNAs and/or guide RNAs can be modified to improve the efficiency of their function in guiding CAS9 to a target nucleic acid. For example, it has been shown that adding either 8 or 20 additional nucleotides to the gRNA in order to extend the hairpin by 4 or 10 base pairs resulted in more efficient CAS9 activity (eLife 2013 2:e00471).

[0133] Alternatively, a tRNA-gRNA expression cassette (Xie, X et al, 2015, Proc Natl Acad Sci USA. 2015 Mar. 17; 112(11):3570-5) may be used to deliver multiple gRNAs simultaneously with high expression levels.

[0134] Trans-Activating CRISPR RNAs

[0135] The trans-activating CRISPR RNA (tracrRNA) of the present disclosure may take a variety of forms, as will be readily understood by one of skill in the art. As described above, tracrRNAs are involved in the maturation of a crRNA. tracrRNAs of the present disclosure may be expressed as a single tracrRNA molecule, or they may be expressed in the form of a crRNA/tracrRNA hybrid molecule where the crRNA and the tracrRNA have been fused together, forming a guide RNA (gRNA). tracrRNA molecules and/or guide RNA molecules may be extended to include sites for the binding of RNA binding proteins.

[0136] As CRISPR systems naturally exist in a variety of bacteria, the framework of the crRNA and tracrRNA in these bacteria may be adapted for use in the methods and compositions described herein. crRNAs, tracrRNAs, and/or guide RNAs of the present disclosure may be constructed based on the framework of one or more of these molecules in, for example, S. pyogenes, Streptococcus thermophilus, and/or N. meningitidis. For example, a guide RNA of the present disclosure may be constructed based on the framework of the crRNA and tracrRNA from S. pyogenes (SEQ ID NO: 18), Streptococcus thermophilus (SEQ ID NO: 19), and/or N. meningitidis (SEQ ID NO: 20). In these exemplary frameworks, the 5′ end of the sequence contains 20 generic nucleotides (N) that correspond to the crRNA targeting sequence. This sequence will vary depending on the sequence of the particular nucleic acid being targeted.

[0137] Linkers

[0138] Various linkers may be used in the construction of recombinant proteins as described herein. In general, linkers are short peptides that separate the different domains in a multi-domain protein. They may play an important role in fusion proteins, affecting the crosstalk between the different domains, the yield of protein production, and the stability and/or the activity of the fusion proteins. Linkers are generally classified into 2 major categories: flexible or rigid. Flexible linkers are typically used when the fused domains require a certain degree of movement or interaction, and these linkers are usually composed of small amino acids such as, for example, glycine (G), serine (S) or proline (P).

[0139] The certain degree of movement between domains allowed by flexible linkers is an advantage in some fusion proteins. However, it has been reported that flexible linkers can sometimes reduce protein activity due to an inefficient separation of the two domains. In this case, rigid linkers may be used since they enforce a fixed distance between domains and promote their independent functions. A thorough description of several linkers has been provided in Chen X et al., 2013, Advanced Drug Delivery Reviews 65 (2013) 1357-1369).

[0140] Various linkers may be used in, for example, the construction of recombinant TET1 polypeptides that are fused to a CAS9 protein as described herein. Linkers may be used in the TET1-CAS9 fusion proteins described herein to separate the coding sequences of a TET1 polypeptide and a CAS9 protein. For example, a variety of wiggly/flexible linkers, stiff/rigid linkers, short linkers, and long linkers may be used as described herein. Various linkers as described herein may be used in the construction of TET1-like proteins as described herein.

[0141] A variety of shorter or longer linker regions are known in the art, for example corresponding to a series of glycine residues, a series of adjacent glycine-serine dipeptides, a series of adjacent glycine-glycine-serine tripeptides, or known linkers from other proteins. A flexible linker may include, for example, the amino acid sequence: SSGPPPGTG (SEQ ID NO: 164) and variants thereof. A rigid linker may include, for example, the amino acid sequence: AEAAAKEAAAKA (SEQ ID NO: 165) and variants thereof. The XTEN linker, SGSETPGTSESATPES (SEQ ID NO: 166), and variants thereof, described in Guilinget et al, 2014 (Nature Biotechnology 32,577-582), may also be used. This particular linker was previously shown to produce the best results among other linkers in a protein fusion between dCAS9 and the nuclease Fokl.

[0142] The linkers having the nucleotide sequences presented in SEQ ID NO: 139 and SEQ ID NO: 140 may also be used in the methods and compositions as described herein. The linker having the amino acid sequence presented in SEQ ID NO: 141 may also be used in the methods and compositions as described herein.

[0143] Variations of CRISPR-CAS9 Targeting

[0144] Certain aspects of the present disclosure relate to recombinantly fusing a TET polypeptide (e.g. TET1 polypeptide) of the present disclosure to a CAS9 protein. However, CRISPR-CAS9 targeting schemes as described herein to target a specific nucleic acid may also involve schemes where a polypeptide of the present disclosure is targeted to a specific nucleic acid without being recombinantly fused to a CAS9 protein.

[0145] The use of recombinant proteins containing a TET polypeptide (e.g. TET1 polypeptide) recombinantly fused to an RNA-binding protein may be used in targeting of the TET polypeptide (e.g. TET1 polypeptide) to a specific nucleic acid via CRISPR-CAS9 targeting. In some embodiments, a TET polypeptide (e.g. TET1 polypeptide) is recombinantly fused to an MS2 coat protein such that these fusion proteins may be directed to a target nucleic acid with the assistance of a CAS9 protein. In some embodiments, MS2 targeting systems may involve a fusion of a TET polypeptide (e.g. TET1 polypeptide) to a dCAS9 polypeptide. In some embodiments, the TET-dCAS9 fusion (e.g. TET1-dCAS9 fusion) is a direct fusion. In some embodiments, the TET-dCAS9 fusion (e.g. TET1-dCAS9 fusion) is an indirect fusion.

[0146] Various MS2 coat proteins may be used, such as SEQ ID NO: 52 and homologs thereof. This targeting scheme is further described herein and will be readily understood by one of skill in the art in view of the present disclosure.

[0147] In addition to fusing a TET polypeptide (e.g. TET1 polypeptide) to an MS2 coat protein, other RNA-binding proteins may also be used in this targeting scheme. For example, the proteins PP7 and COM (Zalatan et al., Cell 160, 339-350), may also be recombinantly fused to a TET polypeptide (e.g. TET1 polypeptide) such that these fusion proteins may be directed to a target nucleic acid with the assistance of a CAS9 protein.

[0148] The use of recombinant proteins containing a TET polypeptide (e.g. TET 1 polypeptide) recombinantly fused to an antibody or fragment thereof may be used in targeting of the TET polypeptide (e.g. TET1 polypeptide) to a specific nucleic acid via CRISPR-CAS9 targeting. In some embodiments, a TET polypeptide (e.g. TET1 polypeptide) is recombinantly fused to an scFV antibody such that these fusion proteins may be directed to a target nucleic acid with the assistance of a CAS9 protein. Various scFV antibodies may be used, such as SEQ ID NO: 53 and homologs thereof. This targeting scheme is further described herein and will be readily understood by one of skill in the art in view of the present disclosure.

[0149] Similar systems using antibody mimetic proteins or proteins which can bind other proteins may also be used in the methods described herein. For example, designed ankyrin repeat proteins (DARPins), which are small and highly stable proteins that can bind their epitopes with strong affinity (Binz et al., 2004, Nat. Biotechnol. 22, 575-582), may be recombinantly fused to a TET polypeptide (e.g. TET1 polypeptide) such that these fusion proteins may be directed to a target nucleic acid with the assistance of a CAS9 protein.

### SunTag Systems

[0150] Certain aspects of the present disclosure relate to the use of SunTag systems for targeting (using CRISPR-based targeting) a TET polypeptide (e.g. TET1 polypeptide) of the present disclosure to a target nucleic acid. A synthetic system was previously developed for use in mammals for recruiting multiple copies of a protein to a target polypeptide chain, and this system was called a SunTag system (Tanenbaum et al., 2014)(WO2016011070). This system was also adapted so that the multiple copies of the protein using the SunTag system could be targeted to a nucleic acid using the CRISPR-Cas9 system (Tanenbaum et al., 2014). However, this system was developed for use in mammals. Provided herein are methods and compositions for SunTag systems adapted to target TET polypeptides (e.g. TET1 polypeptides) to specific loci in plants.

[0151] Accordingly, the present disclosure provides methods and compositions for the recruitment of multiple copies of a TET polypeptide (e.g. TET1 polypeptide) to a target nucleic acid in plants via CRISPR-based targeting in a manner that allows for demethylation and/or activation of the target nucleic acid. In certain aspects, this specific targeting involves the use of a system that includes (1) a nuclease-deficient CAS9 polypeptide that is recombinantly fused to a multimerized epitope, (2) a TET polypeptide (e.g. TET1 polypeptide) that is recombinantly fused to an affinity polypeptide, and (3) a guide RNA (gRNA). In this aspect, the dCAS9 portion of the dCAS9-multimerized epitope fusion protein is involved with targeting a target nucleic acid as directed by the guide RNA. The multimerized epitope portion of the dCAS9-multimerized epitope fusion protein is involved with binding to the affinity polypeptide (which is recombinantly fused to a TET polypeptide (e.g. TET1 polypeptide)). The affinity polypeptide portion of the TET polypeptide (e.g. TET1 polypeptide)-affinity polypeptide fusion protein is involved with binding to the multimerized epitope so that the TET polypeptide (e.g. TET1 polypeptide) can be in association with dCAS9. The TET polypeptide (e.g. TET1 polypeptide) portion of the TET polypeptide (e.g. TET1 polypeptide)-affinity polypeptide fusion protein is involved with inducing demethylation and/or activation of a target nucleic acid, once the complex has been targeted to a target nucleic acid via the guide RNA.

[0152] As described above, SunTag systems involve targeting based on CRISPR-CAS9 systems. CRISPR-CAS9 systems are described above. The features of CRISPR-CAS9 systems may be used in SunTag systems of the present disclosure as appropriate, as will be readily understood by one of skill in the art.

[0153] Affinity Polypeptides

[0154] Certain aspects of the present disclosure relate to recombinant polypeptides that contain an affinity polypeptide. Affinity polypeptides of the present disclosure may bind to one or more epitopes (e.g. a multimerized epitope). In some embodiments, an affinity polypeptide is present in a recombinant polypeptide that contains a TET polypeptide (e.g. TET1 polypeptide) and an affinity polypeptide.

[0155] A variety of affinity polypeptides are known in the art and may be used herein. Generally, the affinity polypeptide should be stable in the conditions present in the intracellular environment of a plant cell. Additionally, the affinity polypeptide should specifically bind to its corresponding epitope with minimal cross-reactivity.

[0156] The affinity polypeptide may be an antibody such as, for example, an scFv. The antibody may be optimized for stability in the plant intracellular environment. When a GCN4 epitope is used in the methods described herein, a suitable affinity polypeptide that is an antibody may contain an anti-GCN4 scFv domain.

[0157] In embodiments where the affinity polypeptide is an scFv antibody, the polypeptide may contain an amino acid sequence with at least about 20%, at least about 25%, at least about 30%, at least about 40%, at least about 50%, at least about 55%, at least about 60%, at least about 65%, at least about 70%, at least about 75%, at least about 80%, at least about 85%, at least about 90%, at least about 91%, at least about 92%, at least about 93%, at least about 94%, at least about 95%, at least about 96%, at least about 97%, at least about 98%, at least about 99%, or at least about 100% amino acid identity to the amino acid sequence of SEQ ID NO: 132.

[0158] Other exemplary affinity polypeptides include, for example, proteins with SH2 domains or the domain itself, 14-3-3 proteins, proteins with SH3 domains or the domain itself, the Alpha-Syntrophin PDZ protein interaction domain, the PDZ signal sequence, or proteins from plants which can recognize AGO hook motifs (e.g. AGO4 from Arabidopsis thaliana).

[0159] Additional affinity polypeptides that may be used in the methods and compositions described herein will be readily apparent to those of skill in the art.

[0160] Epitopes and Multimerized Epitopes

[0161] Certain aspects of the present disclosure relate to recombinant polypeptides that contain an epitope or a multimerized epitope. Epitopes of the present disclosure may bind to an affinity polypeptide. In some embodiments, an epitope or multimerized epitope is present in a recombinant polypeptide that contains a dCAS9 polypeptide.

[0162] Epitopes of the present disclosure may be used for recruiting affinity polypeptides (and any polypeptides they may be recombinantly fused to) to a dCAS9 polypeptide. In embodiments where a dCAS9 polypeptide is fused to an epitope or a multimerized epitope, the dCAS9 polypeptide may be fused to one copy of an epitope, multiple copies of an epitope, more than one different epitope, or multiple copies of more than one different epitope as further described herein.

[0163] A variety of epitopes and multimerized epitopes are known in the art and may be used herein. In general, the epitope or multimerized epitope may be any polypeptide sequence that is specifically recognized by an affinity polypeptide of the present disclosure. Exemplary epitopes may include a c-Myc affinity tag, an HA affinity tag, a His affinity tag, an S affinity tag, a methionine-His affinity tag, an RGD-His affinity tag, a FLAG octapeptide, a strep tag or strep tag II, a V5 tag, a VSV-G epitope, and a GCN4 epitope.

[0164] Other exemplary amino acid sequences that may serve as epitopes and multimerized epitopes include, for example, phosphorylated tyrosines in specific sequence contexts recognized by SH2 domains, characteristic consensus sequences containing phosphoserines recognized by 14-3-3 proteins, proline rich peptide motifs recognized by SH3 domains, the PDZ protein interaction domain or the PDZ signal sequence, and the AGO hook motif from plants.

[0165] Epitopes described herein may also be multimerized. Multimerized epitopes may include at least 2, at least 3, at least 4, at least 5, at least 6, at least 7, at least 8, at least 9, at least 10, at least 11, at least 12, at least 13, at least 14, at least 15, at least 16, at least 17, at least 18, at least 19, at least 20, at least 21, at least 22, at least 23, or at least 24 or more copies of an epitope.

[0166] Multimerized epitopes may be present as tandem copies of an epitope, or each individual epitope may be separated from another epitope in the multimerized epitope by a linker or other amino acid sequence. Suitable linker regions are known in the art and are described herein. The linker may be configured to allow the binding of affinity polypeptides to adjacent epitopes without substantial steric hindrance. Linker sequences may also be configured to provide an unstructured or linear region of the polypeptide to which they are recombinantly fused. The linker sequence may comprise e.g. one or more glycines and/or serines. The linker sequences may be e.g. at least 2, at least 3, at least 4, at least 5, at least 6, at least 7, at least 8, at least 9, or at least 10 or more amino acids in length. The linker sequences may be e.g. 5-10, 10-15, 15-20, or 20-25 amino acids in length.

[0167] In some embodiments, the epitope is a GCN4 epitope (SEQ ID NO: 138). In some embodiments, the multimerized epitope contains at least 2, at least 3, at least 4, at least 5, at least 6, at least 7, at least 8, at least 9, at least 10, at least 11, at least 12, at least 13, at least 14, at least 15, at least 16, at least 17, at least 18, at least 19, at least 20, at least 21, at least 22, at least 23, or at least 24 copies of a GCN4 epitope. In some embodiments, the multimerized epitope contains 10 copies of a GCN4 epitope.

[0168] Additional epitopes and multimerized epitopes that may be used in the methods and compositions described herein will be readily apparent to those of skill in the art.

### Recombinant Polypeptides

[0169] Certain aspects of the present disclosure relate to reducing methylation of a target nucleic acid in a plant by expressing recombinant TET polypeptides in plants. Exemplary TET polypeptides include TET1, TET2, and TET3. Ten-eleven translocation (TET) proteins are known in the art. It has been shown that expressing TET proteins in cell lines leads to a reduction in 5mC levels and leads to the formation of 5hmC. Mutations in the signature His-Xaa-Asp motif (where Xaa represents any amino acid) of these dioxygenases abolishes this activity. His-Xaa-Asp is presented herein as SEQ ID NO: 189. The TET protein family members also share a conserved cysteine-rich region in addition to the dioxygenase motifs (DSBH) role in Fe(II) and oxoglutarate binding. In the presence of the necessary cofactors 2-oxoglutarate and Fe²⁺, TET proteins can efficiently convert 5mC to 5hmC in vitro, and further oxidize to 5fC and 5caC.

[0170] There is conservation of the amoeba NgTet1 with mouse mTet1 and human hTET1 catalytic domain. The NgTet1 can catalyze the conversion of 5mC to 5hmC, and its structure represents the core structure of the catalytic domains of human TET enzymes. Humans TETs have an atypical non-conserved insertion between the two halves of the His-Xaa-Asp and C-term His residues called CTD-like. In addition human TETs have a unique Cis-rich domain at the N-term (residues 1525-1572 in hTET1). Removing these two insertions shows that NgTet1 and mammalian TETs share 14% identity or 39% similarity. However, both can perform the same catalytic activity. Another conservation involves (i) an invariant proline causing a kink of helix a4 and (ii) helices a5 and a6 which are composed of a stretch of residues predicted to be Tet/JBP specific (See Hashimoto et al, 2014 Feb. 20: 506(7488):391-5). An alignment of the TET catalytic domains is presented in FIG. 66A and FIG. 66B. Other TET protein alignments are presented in FIG. 67 and FIG. 68.

[0171] TET proteins are generally considered to be methylcytosine dioxygenases. Certain aspects of the present disclosure relate to use of dioxygenases to reduce methylation of a target nucleic acid. In some embodiments, the catalytic domain of the dioxygenase is used in the methods described herein. The dioxygenase may be a TET polypeptide such as e.g. a TET1 polypeptide, a TET2 polypeptide, a TET3 polypeptide, or the catalytic domain of said polypeptides. In some embodiments, the TET polypeptide includes the amino acid sequence set forth in SEQ ID NO: 189 or SEQ ID NO: 190.

[0172] Certain aspects of the present disclosure relate to use of dioxygenases that use molecular oxygen and the cofactors Fe(II) and 2-oxoglutarate to convert 5-methylcytosine (5mC) to 5-hydroxymethylcytosine (5hmC), 5-formylcytosine (5fC), and 5-carboxylcytosine DNA (together referred to as oxidized methylcytosines or oxi-mC) to reduce methylation of a target nucleic acid.

[0173] Certain methods of the present disclosure relate to reducing methylation of a target nucleic acid in a plant by recombinantly fusing a TET polypeptide (e.g. TET1 polypeptide) to a heterologous DNA-binding domain, where the DNA-binding domain is able to bind a specific nucleic acid sequence and thus the TET polypeptide (e.g. TET1 polypeptide) is targeted to the specific nucleic acid sequence. Certain methods of the present disclosure relate to reducing methylation of a target nucleic acid in a plant by targeting a TET polypeptide (e.g. TET1 polypeptide) recombinantly fused to a CAS9 protein to the target nucleic acid. Certain methods of the present disclosure relate to reducing methylation of a target nucleic acid in a plant by targeting a TET polypeptide (e.g. TET1 polypeptide) to a target nucleic acid with the assistance of a CAS9 protein. As used herein, a “polypeptide” is an amino acid sequence including a plurality of consecutive polymerized amino acid residues (e.g., at least about 15 consecutive polymerized amino acid residues). “Polypeptide” refers to an amino acid sequence, oligopeptide, peptide, protein, or portions thereof, and the terms “polypeptide” and “protein” are used interchangeably.

[0174] Polypeptides as described herein also include polypeptides having various amino acid additions, deletions, or substitutions relative to the native amino acid sequence of a polypeptide of the present disclosure. In some embodiments, polypeptides that are homologs of a polypeptide of the present disclosure contain non-conservative changes of certain amino acids relative to the native sequence of a polypeptide of the present disclosure. In some embodiments, polypeptides that are homologs of a polypeptide of the present disclosure contain conservative changes of certain amino acids relative to the native sequence of a polypeptide of the present disclosure, and thus may be referred to as conservatively modified variants. A conservatively modified variant may include individual substitutions, deletions or additions to a polypeptide sequence which result in the substitution of an amino acid with a chemically similar amino acid. Conservative substitution tables providing functionally similar amino acids are well-known in the art. Such conservatively modified variants are in addition to and do not exclude polymorphic variants, interspecies homologs, and alleles of the disclosure. The following eight groups contain amino acids that are conservative substitutions for one another: 1) Alanine (A), Glycine (G); 2) Aspartic acid (D), Glutamic acid (E); 3) Asparagine (N), Glutamine (Q); 4) Arginine (R), Lysine (K); 5) Isoleucine (I), Leucine (L), Methionine (M), Valine (V); 6) Phenylalanine (F), Tyrosine (Y), Tryptophan (W); 7) Serine (S), Threonine (T); and 8) Cysteine (C), Methionine (M) (see, e.g., Creighton, Proteins (1984)). A modification of an amino acid to produce a chemically similar amino acid may be referred to as an analogous amino acid.

[0175] Recombinant polypeptides of the present disclosure that are composed of individual polypeptide domains may be described based on the individual polypeptide domains of the overall recombinant polypeptide. A domain in such a recombinant polypeptide refers to the particular stretches of contiguous amino acid sequences with a particular function or activity. For example, in a recombinant polypeptide that is a fusion of a TET polypeptide (e.g. TET1 polypeptide) and a DNA-binding domain, the contiguous amino acids that encode the TET polypeptide (e.g. TET1 polypeptide) may be described as the TET domain (e.g. TET1 domain) in the overall recombinant polypeptide, and the contiguous amino acids that encode the DNA-binding domain may be described as the DNA-binding domain in the overall recombinant polypeptide. Individual domains in an overall recombinant protein may also be referred to as units of the recombinant protein. Recombinant polypeptides that are composed of individual polypeptide domains may also be referred to as fusion polypeptides.

[0176] Fusion polypeptides of the present disclosure may contain an individual polypeptide domain that is in various N-terminal or C-terminal orientations relative to other individual polypeptide domains present in the fusion polypeptide. Fusion of individual polypeptide domains in fusion polypeptides may also be direct or indirect fusions. Direct fusions of individual polypeptide domains refer to direct fusion of the coding sequences of each respective individual polypeptide domain. In embodiments where the fusion is indirect, a linker domain or other contiguous amino acid sequence may separate the coding sequences of two individual polypeptide domains in a fusion polypeptide.

[0177] Nuclear Localization Signals (NLS)

[0178] Recombinant polypeptides of the present disclosure may contain one or more nuclear localization signals (NLS). Nuclear localization signals may also be referred to as nuclear localization sequences, domains, peptides, or other terms readily apparent to those of skill in the art. Nuclear localization signals are a translocation sequence that, when present in a polypeptide, direct that polypeptide to localize to the nucleus of a eukaryotic cell.

[0179] Various nuclear localization signals may be used in recombinant polypeptides of the present disclosure. For example, one or more SV40-type NLS or one or more REX NLS may be used in recombinant polypeptides. Recombinant polypeptides may also contain two or more tandem copies of a nuclear localization signal. For example, recombinant polypeptides may contain at least two, at least three, at least for, at least five, at least six, at least seven, at least eight, at least nine, or at least ten copies, either tandem or not, of a nuclear localization signal.

[0180] Recombinant polypeptides of the present disclosure may contain one or more nuclear localization signals that contain an amino acid sequence with at least about 20%, at least about 25%, at least about 30%, at least about 40%, at least about 50%, at least about 55%, at least about 60%, at least about 65%, at least about 70%, at least about 75%, at least about 80%, at least about 85%, at least about 90%, at least about 91%, at least about 92%, at least about 93%, at least about 94%, at least about 95%, at least about 96%, at least about 97%, at least about 98%, at least about 99%, or at least about 100% amino acid identity to the amino acid sequence of any one of SEQ ID NO: 36, SEQ ID NO: 43, SEQ ID NO: 60, SEQ ID NO: 72, SEQ ID NO: 112, SEQ ID NO: 113, and/or SEQ ID NO: 127.

[0181] TET1 Proteins

[0182] Certain aspects of the present disclosure relate to TET1-like proteins. In some embodiments, a TET1-like protein refers to a recombinant TET1 protein or fragment thereof that contains a heterologous DNA-binding domain. In some embodiments, a TET1-like protein refers to a recombinant TET1 protein or fragment thereof that is fused to a CAS9 protein or fragment thereof. In some embodiments, a TET1-like protein refers to a recombinant TET1 protein or fragment thereof that is fused to an MS2 coat protein or fragment thereof. In some embodiments, a TET1-like protein refers to a recombinant TET1 protein or fragment thereof that is fused to an scFV antibody or fragment thereof. TET1-like proteins may be used in reducing methylation of one or more target nucleic acids, such as genes, in plants.

[0183] TET1 is an enzyme that catalyzes the conversion of 5-methylcytosine (5mC) to 5-hydroxymethylcytosine (5hmC) (Tahiliani, M. et al. Science 324, 930-935 (2009)). While the role of 5hmC is not entirely clear, it has been proposed that it may be an intermediate in the process of demethylation of 5-methylcytosine to cytosine. This is supported by evidence that overexpression of TET1 in cultured cells leads to an overall decrease in levels of 5mC (Tahiliani, M. et al. Science 324, 930-935 (2009)). Several mechanisms of demethylation have been proposed. There is evidence that 5hmC can be deaminated and that the resulting mismatched base is recognized by DNA glycosylases and subsequently repaired to cytosine via the base excision repair pathway (Guo et el., Cell 145, 423-434 (2011)). Alternatively, there is also evidence that iterative oxidation of 5hmC by TET1 yields 5-formylcytosine (fC) and 5-carboxylcytosine (caC), which can then be recognized by thymine DNA glycosylase and reverted to cytosine through base excision repair (He et al., Science 333, 1303-1307 (2011)). In either case, the evidence highlights TET1 as a primary catalyst for DNA demethylation.

[0184] In some embodiments, a TET1-like protein of the present disclosure includes a functional fragment of a full-length TET1 protein where the fragment maintains the ability to catalyze demethylation of a nucleic acid. In some embodiments, a TET1 protein fragment contains at least 20 consecutive amino acids, at least 30 consecutive amino acids, at least 40 consecutive amino acids, at least 50 consecutive amino acids, at least 60 consecutive amino acids, at least 70 consecutive amino acids, at least 80 consecutive amino acids, at least 90 consecutive amino acids, at least 100 consecutive amino acids, at least 120 consecutive amino acids, at least 140 consecutive amino acids, at least 160 consecutive amino acids, at least 180 consecutive amino acids, at least 200 consecutive amino acids, at least 220 consecutive amino acids, at least 240 consecutive amino acids, or 241 or more consecutive amino acids of a full-length TET1 protein. In some embodiments, TET1 protein fragments may include sequences with one or more amino acids removed from the consecutive amino acid sequence of a full-length TET1 protein. In some embodiments, TET1 protein fragments may include sequences with one or more amino acids replaced/substituted with an amino acid different from the endogenous amino acid present at a given amino acid position in a consecutive amino acid sequence of a full-length TET1 protein. In some embodiments, TET1 protein fragments may include sequences with one or more amino acids added to an otherwise consecutive amino acid sequence of a full-length TET1 protein.

[0185] Suitable TET1 proteins may be identified and isolated from various mammalian organisms. Examples of such organisms may include, for example, Homo sapiens, Pan paniscus, Gorilla gorilla, Mandrillus leucophaeus, Equus caballus, Canis lupus familiaris, and Ovis aries. Examples of suitable TET1 proteins may include, for example, those listed in Table 1, homologs thereof, and orthologs thereof.

TABLE 1
TET1 Proteins

| Organism | Gene Name | SED ID NO. |
|---|---|---|
| Homo sapiens | NP_085128 | 1 |
| Pan paniscus | XP_003846089.1 | 2 |
| Gorilla gorilla | XP_004049552.1 | 3 |
| Mandrillus leucophaeus | XP_011849484 | 4 |
| Equus caballus | XP_005602635 | 5 |
| Canis lupus familiaris | XP_536371 | 6 |
| Ovis aries | XP_011960588 | 7 |

[0186] In some embodiments, a TET1 protein or fragment thereof of the present disclosure has an amino acid sequence with at least about 20%, at least about 25%, at least about 30%, at least about 40%, at least about 50%, at least about 55%, at least about 60%, at least about 65%, at least about 70%, at least about 75%, at least about 80%, at least about 85%, at least about 90%, at least about 91%, at least about 92%, at least about 93%, at least about 94%, at least about 95%, at least about 96%, at least about 97%, at least about 98%, at least about 99%, or at least about 100% amino acid identity to the amino acid sequence of the Homo sapiens TET1 protein (SEQ ID NO: 1).

[0187] A TET1-like protein may include the amino acid sequence or a fragment thereof of any TET1 homolog or ortholog, such as any one of those listed in Table 1. One of skill would readily recognize that additional TET1 homologs and/or orthologs may exist and may be used herein.

[0188] In certain aspects, the catalytic domain of a TET1 protein may be used in the methods and compositions described herein. The catalytic domain of TET1 is responsible for facilitating demethylation of a nucleic acid. Examples of suitable TET1 catalytic domains may include, for example, those listed in Table 2, homologs thereof, and orthologs thereof.

TABLE 2
TET1 Protein Catalytic Domains

| Organism | Gene Name | SED ID NO. |
|---|---|---|
| Homo sapiens | NP_085128 | 8 |
| Pan paniscus | XP_003846089.1 | 9 |
| Gorilla gorilla | XP_004049552.1 | 10 |
| Mandrillus leucophaeus | XP_011849484 | 11 |
| Equus caballus | XP_005602635 | 12 |
| Canis lupus familiaris | XP_536371 | 13 |
| Ovis aries | XP_011960588 | 14 |

[0189] In some embodiments, a TET1 protein catalytic domain of the present disclosure has an amino acid sequence with at least about 20%, at least about 25%, at least about 30%, at least about 40%, at least about 50%, at least about 55%, at least about 60%, at least about 65%, at least about 70%, at least about 75%, at least about 80%, at least about 85%, at least about 90%, at least about 91%, at least about 92%, at least about 93%, at least about 94%, at least about 95%, at least about 96%, at least about 97%, at least about 98%, at least about 99%, or at least about 100% amino acid identity to the amino acid sequence of the Homo sapiens TET1 protein catalytic domain (SEQ ID NO: 8).

[0190] A TET1-like protein may include the amino acid sequence or a fragment thereof of the catalytic domain of any TET1 homolog or ortholog, such as any one of those listed in Table 2. One of skill would readily recognize that catalytic domains from additional TET1 homologs and/or orthologs may exist and may be used herein.

[0191] TET2 Proteins

[0192] Certain aspects of the present disclosure relate to TET2-like proteins. In some embodiments, a TET2-like protein refers to a recombinant TET2 protein or fragment thereof that contains a heterologous DNA-binding domain. In some embodiments, a TET2-like protein refers to a recombinant TET2 protein or fragment thereof that is fused to a CAS9 protein or fragment thereof. In some embodiments, a TET2-like protein refers to a recombinant TET2 protein or fragment thereof that is fused to an MS2 coat protein or fragment thereof. In some embodiments, a TET2-like protein refers to a recombinant TET2 protein or fragment thereof that is fused to an scFV antibody or fragment thereof. TET2-like proteins may be used in reducing methylation of one or more target nucleic acids, such as genes, in plants.

[0193] In some embodiments, a TET2-like protein of the present disclosure includes a functional fragment of a full-length TET2 protein where the fragment maintains the ability to catalyze demethylation of a nucleic acid. In some embodiments, a TET2 protein fragment contains at least 20 consecutive amino acids, at least 30 consecutive amino acids, at least 40 consecutive amino acids, at least 50 consecutive amino acids, at least 60 consecutive amino acids, at least 70 consecutive amino acids, at least 80 consecutive amino acids, at least 90 consecutive amino acids, at least 100 consecutive amino acids, at least 120 consecutive amino acids, at least 140 consecutive amino acids, at least 160 consecutive amino acids, at least 180 consecutive amino acids, at least 200 consecutive amino acids, at least 220 consecutive amino acids, at least 240 consecutive amino acids, or 241 or more consecutive amino acids of a full-length TET2 protein. In some embodiments, TET2 protein fragments may include sequences with one or more amino acids removed from the consecutive amino acid sequence of a full-length TET2 protein. In some embodiments, TET2 protein fragments may include sequences with one or more amino acids replaced/substituted with an amino acid different from the endogenous amino acid present at a given amino acid position in a consecutive amino acid sequence of a full-length TET2 protein. In some embodiments, TET2 protein fragments may include sequences with one or more amino acids added to an otherwise consecutive amino acid sequence of a full-length TET2 protein.

[0194] Suitable TET2 proteins may be identified and isolated from various mammalian organisms. The amino acid sequence of human TET2 protein is set forth in SEQ ID NO: 191.

[0195] In some embodiments, a TET2 protein or fragment thereof of the present disclosure has an amino acid sequence with at least about 20%, at least about 25%, at least about 30%, at least about 40%, at least about 50%, at least about 55%, at least about 60%, at least about 65%, at least about 70%, at least about 75%, at least about 80%, at least about 85%, at least about 90%, at least about 91%, at least about 92%, at least about 93%, at least about 94%, at least about 95%, at least about 96%, at least about 97%, at least about 98%, at least about 99%, or at least about 100% amino acid identity to the amino acid sequence of the Homo sapiens TET2 protein (SEQ ID NO: 191).

[0196] In certain aspects, the catalytic domain of a TET2 protein may be used in the methods and compositions described herein. The catalytic domain of TET2 is responsible for facilitating demethylation of a nucleic acid. The amino acid sequence of the catalytic domain of human TET2 protein is set forth in SEQ ID NO: 192.

[0197] In some embodiments, a TET2 protein catalytic domain of the present disclosure has an amino acid sequence with at least about 20%, at least about 25%, at least about 30%, at least about 40%, at least about 50%, at least about 55%, at least about 60%, at least about 65%, at least about 70%, at least about 75%, at least about 80%, at least about 85%, at least about 90%, at least about 91%, at least about 92%, at least about 93%, at least about 94%, at least about 95%, at least about 96%, at least about 97%, at least about 98%, at least about 99%, or at least about 100% amino acid identity to the amino acid sequence of the Homo sapiens TET2 protein catalytic domain (SEQ ID NO: 192).

[0198] A TET2-like protein may include the amino acid sequence or a fragment thereof of the catalytic domain of any TET2 homolog or ortholog. One of skill would readily recognize that catalytic domains from additional TET2 homologs and/or orthologs may exist and may be used herein.

[0199] TET3 Proteins

[0200] Certain aspects of the present disclosure relate to TET3-like proteins. In some embodiments, a TET3-like protein refers to a recombinant TET3 protein or fragment thereof that contains a heterologous DNA-binding domain. In some embodiments, a TET3-like protein refers to a recombinant TET3 protein or fragment thereof that is fused to a CAS9 protein or fragment thereof. In some embodiments, a TET3-like protein refers to a recombinant TET3 protein or fragment thereof that is fused to an MS2 coat protein or fragment thereof. In some embodiments, a TET3-like protein refers to a recombinant TET3 protein or fragment thereof that is fused to an scFV antibody or fragment thereof. TET3-like proteins may be used in reducing methylation of one or more target nucleic acids, such as genes, in plants.

[0201] In some embodiments, a TET3-like protein of the present disclosure includes a functional fragment of a full-length TET3 protein where the fragment maintains the ability to catalyze demethylation of a nucleic acid. In some embodiments, a TET3 protein fragment contains at least 20 consecutive amino acids, at least 30 consecutive amino acids, at least 40 consecutive amino acids, at least 50 consecutive amino acids, at least 60 consecutive amino acids, at least 70 consecutive amino acids, at least 80 consecutive amino acids, at least 90 consecutive amino acids, at least 100 consecutive amino acids, at least 120 consecutive amino acids, at least 140 consecutive amino acids, at least 160 consecutive amino acids, at least 180 consecutive amino acids, at least 200 consecutive amino acids, at least 220 consecutive amino acids, at least 240 consecutive amino acids, or 241 or more consecutive amino acids of a full-length TET3 protein. In some embodiments, TET3 protein fragments may include sequences with one or more amino acids removed from the consecutive amino acid sequence of a full-length TET3 protein. In some embodiments, TET3 protein fragments may include sequences with one or more amino acids replaced/substituted with an amino acid different from the endogenous amino acid present at a given amino acid position in a consecutive amino acid sequence of a full-length TET3 protein. In some embodiments, TET3 protein fragments may include sequences with one or more amino acids added to an otherwise consecutive amino acid sequence of a full-length TET3 protein.

[0202] Suitable TET3 proteins may be identified and isolated from various mammalian organisms. The amino acid sequence of human TET3 protein is set forth in SEQ ID NO: 193.

[0203] In some embodiments, a TET3 protein or fragment thereof of the present disclosure has an amino acid sequence with at least about 20%, at least about 25%, at least about 30%, at least about 40%, at least about 50%, at least about 55%, at least about 60%, at least about 65%, at least about 70%, at least about 75%, at least about 80%, at least about 85%, at least about 90%, at least about 91%, at least about 92%, at least about 93%, at least about 94%, at least about 95%, at least about 96%, at least about 97%, at least about 98%, at least about 99%, or at least about 100% amino acid identity to the amino acid sequence of the Homo sapiens TET3 protein (SEQ ID NO: 193).

[0204] In certain aspects, the catalytic domain of a TET3 protein may be used in the methods and compositions described herein. The catalytic domain of TET3 is responsible for facilitating demethylation of a nucleic acid. The amino acid sequence of the catalytic domain of human TET3 protein is set forth in SEQ ID NO: 194.

[0205] In some embodiments, a TET3 protein catalytic domain of the present disclosure has an amino acid sequence with at least about 20%, at least about 25%, at least about 30%, at least about 40%, at least about 50%, at least about 55%, at least about 60%, at least about 65%, at least about 70%, at least about 75%, at least about 80%, at least about 85%, at least about 90%, at least about 91%, at least about 92%, at least about 93%, at least about 94%, at least about 95%, at least about 96%, at least about 97%, at least about 98%, at least about 99%, or at least about 100% amino acid identity to the amino acid sequence of the Homo sapiens TET3 protein catalytic domain (SEQ ID NO: 194).

[0206] A TET3-like protein may include the amino acid sequence or a fragment thereof of the catalytic domain of any TET3 homolog or ortholog. One of skill would readily recognize that catalytic domains from additional TET3 homologs and/or orthologs may exist and may be used herein.

### Recombinant Nucleic Acids Encoding Recombinant Proteins

[0207] Certain aspects of the present disclosure relate to recombinant nucleic acids encoding recombinant proteins of the present disclosure (e.g. TET-like proteins, such as TET1-like proteins). In some embodiments, a TET-like protein (e.g. TET1-like protein) is a recombinant TET protein (e.g. TET1 protein) or fragment thereof that contains a heterologous DNA-binding domain. In some embodiments, a TET-like protein (e.g. TET1-like protein) is a recombinant TET protein (e.g. TET1 protein) or fragment thereof that is fused to a CAS9 protein or fragment thereof. In some embodiments, a TET-like protein (e.g. TET1-like protein) is a recombinant TET protein (e.g. TET1 protein) or fragment thereof that is fused to an MS2 coat protein or fragment thereof. In some embodiments, a TET-like protein (e.g. TET1-like protein) is a recombinant TET protein (e.g. TET1 protein) or fragment thereof that is fused to an scFV antibody or fragment thereof.

[0208] As used herein, the terms “polynucleotide,” “nucleic acid,” and variations thereof shall be generic to polydeoxyribonucleotides (containing 2-deoxy-D-ribose), to polyribonucleotides (containing D-ribose), to any other type of polynucleotide that is an N-glycoside of a purine or pyrimidine base, and to other polymers containing non-nucleotidic backbones, provided that the polymers contain nucleobases in a configuration that allows for base pairing and base stacking, as found in DNA and RNA. Thus, these terms include known types of nucleic acid sequence modifications, for example, substitution of one or more of the naturally occurring nucleotides with an analog, and inter-nucleotide modifications. As used herein, the symbols for nucleotides and polynucleotides are those recommended by the IUPAC-IUB Commission of Biochemical Nomenclature.

[0209] In one aspect, the present disclosure provides a recombinant nucleic acid encoding a TET1-like protein. In some embodiments, the recombinant nucleic acid encodes a TET1 polypeptide or fragment thereof that has an amino acid sequence that is at least 50%, at least 55%, at least 60%, at least 65%, at least 70%, at least 75%, at least 80%, at least 85%, at least 90%, at least 91%, at least 92%, at least 93%, at least 94%, at least 95%, at least 96%, at least 97%, at least 98%, at least 99%, or 100% identical to SEQ ID NO: 1.

[0210] In one aspect, the present disclosure provides a recombinant nucleic acid encoding a TET1-like protein. In some embodiments, the recombinant nucleic acid encodes a catalytic domain of a TET1 protein that has an amino acid sequence that is at least 50%, at least 55%, at least 60%, at least 65%, at least 70%, at least 75%, at least 80%, at least 85%, at least 90%, at least 91%, at least 92%, at least 93%, at least 94%, at least 95%, at least 96%, at least 97%, at least 98%, at least 99%, or 100% identical to SEQ ID NO: 8.

[0211] In one aspect, the present disclosure provides a recombinant nucleic acid encoding a TET2-like protein. In some embodiments, the recombinant nucleic acid encodes a catalytic domain of a TET2 protein that has an amino acid sequence that is at least 50%, at least 55%, at least 60%, at least 65%, at least 70%, at least 75%, at least 80%, at least 85%, at least 90%, at least 91%, at least 92%, at least 93%, at least 94%, at least 95%, at least 96%, at least 97%, at least 98%, at least 99%, or 100% identical to SEQ ID NO: 192.

[0212] In one aspect, the present disclosure provides a recombinant nucleic acid encoding a TET3-like protein. In some embodiments, the recombinant nucleic acid encodes a catalytic domain of a TET3 protein that has an amino acid sequence that is at least 50%, at least 55%, at least 60%, at least 65%, at least 70%, at least 75%, at least 80%, at least 85%, at least 90%, at least 91%, at least 92%, at least 93%, at least 94%, at least 95%, at least 96%, at least 97%, at least 98%, at least 99%, or 100% identical to SEQ ID NO: 194.

[0213] Sequences of the polynucleotides of the present disclosure may be prepared by various suitable methods known in the art, including, for example, direct chemical synthesis or cloning. For direct chemical synthesis, formation of a polymer of nucleic acids typically involves sequential addition of 3 ‘-blocked and 5 ’-blocked nucleotide monomers to the terminal 5′-hydroxyl group of a growing nucleotide chain, wherein each addition is effected by nucleophilic attack of the terminal 5′-hydroxyl group of the growing chain on the 3′-position of the added monomer, which is typically a phosphorus derivative, such as a phosphotriester, phosphoramidite, or the like. Such methodology is known to those of ordinary skill in the art and is described in the pertinent texts and literature (e.g., in Matteucci et al., (1980) Tetrahedron Lett 21:719-722; U.S. Pat. Nos. 4,500,707; 5,436,327; and 5,700,637). In addition, the desired sequences may be isolated from natural sources by splitting DNA using appropriate restriction enzymes, separating the fragments using gel electrophoresis, and thereafter, recovering the desired polynucleotide sequence from the gel via techniques known to those of ordinary skill in the art, such as utilization of polymerase chain reactions (PCR; e.g., U.S. Pat. No. 4,683,195).

[0214] The nucleic acids employed in the methods and compositions described herein may be codon optimized relative to a parental template for expression in a particular host cell. Cells differ in their usage of particular codons, and codon bias corresponds to relative abundance of particular tRNAs in a given cell type. By altering codons in a sequence so that they are tailored to match with the relative abundance of corresponding tRNAs, it is possible to increase expression of a product (e.g. a polypeptide) from a nucleic acid. Similarly, it is possible to decrease expression by deliberately choosing codons corresponding to rare tRNAs. Thus, codon optimization/deoptimization can provide control over nucleic acid expression in a particular cell type (e.g. bacterial cell, plant cell, mammalian cell, etc.). Methods of codon optimizing a nucleic acid for tailored expression in a particular cell type are well-known to those of skill in the art.

### Methods of Identifying Sequence Similarity

[0215] Various methods are known to those of skill in the art for identifying similar (e.g. homologs, orthologs, paralogs, etc.) polypeptide and/or polynucleotide sequences, including phylogenetic methods, sequence similarity analysis, and hybridization methods.

[0216] Phylogenetic trees may be created for a gene family by using a program such as CLUSTAL (Thompson et al. Nucleic Acids Res. 22: 4673-4680 (1994); Higgins et al. Methods Enzymol 266: 383-402 (1996)) or MEGA (Tamura et al. Mol. Biol. & Evo. 24:1596-1599 (2007)). Once an initial tree for genes from one species is created, potential orthologous sequences can be placed in the phylogenetic tree and their relationships to genes from the species of interest can be determined. Evolutionary relationships may also be inferred using the Neighbor-Joining method (Saitou and Nei, Mol. Biol. & Evo. 4:406-425 (1987)). Homologous sequences may also be identified by a reciprocal BLAST strategy. Evolutionary distances may be computed using the Poisson correction method (Zuckerkandl and Pauling, pp. 97-166 in Evolving Genes and Proteins, edited by V. Bryson and H. J. Vogel. Academic Press, New York (1965)).

[0217] In addition, evolutionary information may be used to predict gene function. Functional predictions of genes can be greatly improved by focusing on how genes became similar in sequence (i.e. by evolutionary processes) rather than on the sequence similarity itself (Eisen, Genome Res. 8: 163-167 (1998)). Many specific examples exist in which gene function has been shown to correlate well with gene phylogeny (Eisen, Genome Res. 8: 163-167 (1998)). By using a phylogenetic analysis, one skilled in the art would recognize that the ability to deduce similar functions conferred by closely-related polypeptides is predictable.

[0218] When a group of related sequences are analyzed using a phylogenetic program such as CLUSTAL, closely related sequences typically cluster together or in the same Glade (a group of similar genes). Groups of similar genes can also be identified with pair-wise BLAST analysis (Feng and Doolittle, J. Mol. Evol. 25: 351-360 (1987)). Analysis of groups of similar genes with similar function that fall within one Glade can yield sub-sequences that are particular to the Glade. These sub-sequences, known as consensus sequences, can not only be used to define the sequences within each Glade, but define the functions of these genes; genes within a Glade may contain paralogous sequences, or orthologous sequences that share the same function (see also, for example, Mount, Bioinformatics: Sequence and Genome Analysis Cold Spring Harbor Laboratory Press, Cold Spring Harbor, N.Y., page 543 (2001)).

[0219] To find sequences that are homologous to a reference sequence, BLAST nucleotide searches can be performed with the BLASTN program, score=100, wordlength=12, to obtain nucleotide sequences homologous to a nucleotide sequence encoding a protein of the disclosure. BLAST protein searches can be performed with the BLASTX program, score=50, wordlength=3, to obtain amino acid sequences homologous to a protein or polypeptide of the disclosure. To obtain gapped alignments for comparison purposes, Gapped BLAST (in BLAST 2.0) can be utilized as described in Altschul et al. (1997) Nucleic Acids Res. 25:3389. Alternatively, PSI-BLAST (in BLAST 2.0) can be used to perform an iterated search that detects distant relationships between molecules. See Altschul et al. (1997) supra. When utilizing BLAST, Gapped BLAST, or PSI-BLAST, the default parameters of the respective programs (e.g., BLASTN for nucleotide sequences, BLASTX for proteins) can be used.

[0220] Methods for the alignment of sequences and for the analysis of similarity and identity of polypeptide and polynucleotide sequences are well-known in the art.

[0221] As used herein “sequence identity” refers to the percentage of residues that are identical in the same positions in the sequences being analyzed. As used herein “sequence similarity” refers to the percentage of residues that have similar biophysical/biochemical characteristics in the same positions (e.g. charge, size, hydrophobicity) in the sequences being analyzed.

[0222] Methods of alignment of sequences for comparison are well-known in the art, including manual alignment and computer assisted sequence alignment and analysis. This latter approach is a preferred approach in the present disclosure, due to the increased throughput afforded by computer assisted methods. As noted below, a variety of computer programs for performing sequence alignment are available, or can be produced by one of skill.

[0223] The determination of percent sequence identity and/or similarity between any two sequences can be accomplished using a mathematical algorithm. Examples of such mathematical algorithms are the algorithm of Myers and Miller, CABIOS 4:11-17 (1988); the local homology algorithm of Smith et al., Adv. Appl. Math. 2:482 (1981); the homology alignment algorithm of Needleman and Wunsch, J. Mol. Biol. 48:443-453 (1970); the search-for-similarity-method of Pearson and Lipman, Proc. Natl. Acad. Sci. 85:2444-2448 (1988); the algorithm of Karlin and Altschul, Proc. Natl. Acad. Sci. USA 87:2264-2268 (1990), modified as in Karlin and Altschul, Proc. Natl. Acad. Sci. USA 90:5873-5877 (1993).

[0224] Computer implementations of these mathematical algorithms can be utilized for comparison of sequences to determine sequence identity and/or similarity. Such implementations include, for example: CLUSTAL in the PC/Gene program (available from Intelligenetics, Mountain View, Calif.); the AlignX program, version10.3.0 (Invitrogen, Carlsbad, Calif.) and GAP, BESTFIT, BLAST, FASTA, and TFASTA in the Wisconsin Genetics Software Package, Version 8 (available from Genetics Computer Group (GCG), 575 Science Drive, Madison, Wis., USA). Alignments using these programs can be performed using the default parameters. The CLUSTAL program is well described by Higgins et al. Gene 73:237-244 (1988); Higgins et al. CABIOS 5:151-153 (1989); Corpet et al., Nucleic Acids Res. 16:10881-90 (1988); Huang et al. CABIOS 8:155-65 (1992); and Pearson et al., Meth. Mol. Biol. 24:307-331 (1994). The BLAST programs of Altschul et al. J. Mol. Biol. 215:403-410 (1990) are based on the algorithm of Karlin and Altschul (1990) supra.

[0225] Polynucleotides homologous to a reference sequence can be identified by hybridization to each other under stringent or under highly stringent conditions. Single stranded polynucleotides hybridize when they associate based on a variety of well characterized physical-chemical forces, such as hydrogen bonding, solvent exclusion, base stacking and the like. The stringency of a hybridization reflects the degree of sequence identity of the nucleic acids involved, such that the higher the stringency, the more similar are the two polynucleotide strands. Stringency is influenced by a variety of factors, including temperature, salt concentration and composition, organic and non-organic additives, solvents, etc. present in both the hybridization and wash solutions and incubations (and number thereof), as described in more detail in references cited below (e.g., Sambrook et al., Molecular Cloning: A Laboratory Manual, 2nd Ed., Vol. 1-3, Cold Spring Harbor Laboratory, Cold Spring Harbor, N.Y. (“Sambrook”) (1989); Berger and Kimmel, Guide to Molecular Cloning Techniques, Methods in Enzymology, vol. 152 Academic Press, Inc., San Diego, Calif. (“Berger and Kimmel”) (1987); and Anderson and Young, “Quantitative Filter Hybridisation.” In: Hames and Higgins, ed., Nucleic Acid Hybridisation, A Practical Approach. Oxford, TRL Press, 73-111 (1985)).

[0226] Encompassed by the disclosure are polynucleotide sequences that are capable of hybridizing to the disclosed polynucleotide sequences and fragments thereof under various conditions of stringency (see, for example, Wahl and Berger, Methods Enzymol. 152: 399-407 (1987); and Kimmel, Methods Enzymo. 152: 507-511, (1987)). Full length cDNA, homologs, orthologs, and paralogs of polynucleotides of the present disclosure may be identified and isolated using well-known polynucleotide hybridization methods.

[0227] With regard to hybridization, conditions that are highly stringent, and means for achieving them, are well known in the art. See, for example, Sambrook et al. (1989) (supra); Berger and Kimmel (1987) pp. 467-469 (supra); and Anderson and Young (1985)(supra).

[0228] Hybridization experiments are generally conducted in a buffer of pH between 6.8 to 7.4, although the rate of hybridization is nearly independent of pH at ionic strengths likely to be used in the hybridization buffer (Anderson and Young (1985)(supra)). In addition, one or more of the following may be used to reduce non-specific hybridization: sonicated salmon sperm DNA or another non-complementary DNA, bovine serum albumin, sodium pyrophosphate, sodium dodecylsulfate (SDS), polyvinyl-pyrrolidone, ficoll and Denhardt's solution. Dextran sulfate and polyethylene glycol 6000 act to exclude DNA from solution, thus raising the effective probe DNA concentration and the hybridization signal within a given unit of time. In some instances, conditions of even greater stringency may be desirable or required to reduce non-specific and/or background hybridization. These conditions may be created with the use of higher temperature, lower ionic strength and higher concentration of a denaturing agent such as formamide.

[0229] Stringency conditions can be adjusted to screen for moderately similar fragments such as homologous sequences from distantly related organisms, or to highly similar fragments such as genes that duplicate functional enzymes from closely related organisms. The stringency can be adjusted either during the hybridization step or in the post-hybridization washes. Salt concentration, formamide concentration, hybridization temperature and probe lengths are variables that can be used to alter stringency. As a general guideline, high stringency is typically performed at Tₘ-5° C. to Tₘ-20° C., moderate stringency at Tₘ-20° C. to Tₘ-35° C. and low stringency at Tₘ-35° C. to Tₘ-50° C. for duplex>150 base pairs. Hybridization may be performed at low to moderate stringency (25-50° C. below Tₘ), followed by post-hybridization washes at increasing stringencies. Maximum rates of hybridization in solution are determined empirically to occur at Tₘ-25° C. for DNA-DNA duplex and Tₘ-15° C. for RNA-DNA duplex. Optionally, the degree of dissociation may be assessed after each wash step to determine the need for subsequent, higher stringency wash steps.

[0230] High stringency conditions may be used to select for nucleic acid sequences with high degrees of identity to the disclosed sequences. An example of stringent hybridization conditions obtained in a filter-based method such as a Southern or northern blot for hybridization of complementary nucleic acids that have more than 100 complementary residues is about 5° C. to 20° C. lower than the thermal melting point (Tₘ) for the specific sequence at a defined ionic strength and pH.

[0231] Hybridization and wash conditions that may be used to bind and remove polynucleotides with less than the desired homology to the nucleic acid sequences or their complements of the present disclosure include, for example: 6×SSC and 1% SDS at 65° C.; 50% formamide, 4×SSC at 42° C.; 0.5×SSC to 2.0×SSC, 0.1% SDS at 50° C. to 65° C.; or 0.1×SSC to 2×SSC, 0.1% SDS at 50° C.-65° C.; with a first wash step of, for example, 10 minutes at about 42° C. with about 20% (v/v) formamide in 0.1×SSC, and with, for example, a subsequent wash step with 0.2×SSC and 0.1% SDS at 65° C. for 10, 20 or 30 minutes.

[0232] For identification of less closely related homologs, wash steps may be performed at a lower temperature, e.g., 50° C. An example of a low stringency wash step employs a solution and conditions of at least 25° C. in 30 mM NaCl, 3 mM trisodium citrate, and 0.1% SDS over 30 min. Greater stringency may be obtained at 42° C. in 15 mM NaCl, with 1.5 mM trisodium citrate, and 0.1% SDS over 30 min. Wash procedures will generally employ at least two final wash steps. Additional variations on these conditions will be readily apparent to those skilled in the art (see, for example, US Patent Application No. 20010010913).

[0233] If desired, one may employ wash steps of even greater stringency, including conditions of 65° C.-68° C. in a solution of 15 mM NaCl, 1.5 mM trisodium citrate, and 0.1% SDS, or about 0.2×SSC, 0.1% SDS at 65° C. and washing twice, each wash step of 10, 20 or 30 min in duration, or about 0.1×SSC, 0.1% SDS at 65° C. and washing twice for 10, 20 or 30 min. Hybridization stringency may be increased further by using the same conditions as in the hybridization steps, with the wash temperature raised about 3° C. to about 5° C., and stringency may be increased even further by using the same conditions except the wash temperature is raised about 6° C. to about 9° C.

### Target Nucleic Acids of the Present Disclosure

[0234] The recombinant TET-like proteins (e.g. TET1-like proteins) of the present disclosure may be targeted to specific target nucleic acids to induce demethylation of the target nucleic acid. In some embodiments, TET-like proteins (e.g. TET1-like proteins) are targeted to a specific nucleic acid via a heterologous DNA-binding domain. In some embodiments, TET-like proteins (e.g. TET1-like proteins) reduce methylation of a target nucleic acid by being targeted to the nucleic acid by a guide RNA. In this sense, a target nucleic acid of the present disclosure is targeted based on the particular nucleotide sequence in the target nucleic acid that is recognized by the targeting portion of a TET-like polypeptide such as a TET1-like polypeptide (e.g. DNA-binding domain or guide RNA).

[0235] In some embodiments, a target nucleic acid of the present disclosure is a nucleic acid that is located at any location within a target gene that provides a suitable location for reducing methylation of the target gene. The target nucleic acid may be located within the coding region of a target gene or upstream or downstream thereof. Moreover, the target nucleic acid may reside endogenously in a target gene or may be inserted into the gene, e.g., heterologous, for example, using techniques such as homologous recombination. For example, a target gene of the present disclosure can be operably linked to a control region, such as a promoter, that contains a sequence that can be recognized by e.g. a crRNA/tracrRNA and/or a guide RNA of the present disclosure such that recombinant TET-like proteins (e.g. TET1-like proteins) of the present disclosure are targeted to that sequence. Also, the target nucleic acid may be one that is able to be bound by a DNA-binding domain that is recombinantly fused to a TET-like protein (e.g. TET1-like protein) of the present disclosure.

[0236] In some embodiments, the target nucleic acid is endogenous to the plant where the expression of one or more genes is modulated by a TET-like protein (e.g. TET1-like protein) as a result of reduced methylation at the target nucleic acid as facilitated by the TET-like protein (e.g. TET1-like protein). In some embodiments, the target nucleic acid is a transgene of interest that has been inserted into a plant. Methods of introducing transgenes into plants are well known in the art. Transgenes may be inserted into plants in order to provide a production system for a desired protein, or may be added to the genetic compliment in order to modulate the metabolism of a plant. In some embodiments, the expression of a target nucleic acid is increased as a consequence of the methods of the present disclosure using TET-like proteins (e.g. TET1-like proteins).

[0237] Suitable target nucleic acids will be readily apparent to one of skill in the art depending on the particular need or outcome. The target nucleic acid may be in e.g. a region of euchromatin (e.g. highly expressed gene), or the target nucleic acid may be in a region of heterochromatin (e.g. centromere DNA). Use of TET-like proteins (e.g. TET1-like proteins) as described herein to target demethylation and transcript activation in a region of heterochromatin or other highly methylated region of a plant genome may be especially useful in certain research embodiments. For example, use of TET1-like proteins to demethylate and activate a retrotransposon in a plant genome may find use in inducing mutagenesis of other genomic regions in that genome.

[0238] In some embodiments, a target nucleic acid may have its expression downregulated/reduced, or silenced, by a TET-like protein (e.g. TET1-like protein) according to the methods of the present disclosure. The particular nature of the target nucleic acid, and the role that methylation of that nucleic acid plays with respect to expression of that target nucleic acid, are factors that may govern whether a particular target nucleic acid may have its expression increased or decreased as compared to a corresponding control nucleic acid according to the methods of the present disclosure. Reduction in methylation of a target nucleic acid may lead to increased expression, or reduction in methylation may lead to decreased expression, as compared to a corresponding control.

### Plants of the Present Disclosure

[0239] Certain aspects of the present disclosure relate to plants containing TET-like proteins (e.g. TET1-like proteins) that are targeted to one or more target nucleic acids in the plant and reduce the methylation level of the one or more target nucleic acids.

[0240] As used herein, a “plant” refers to any of various photosynthetic, eukaryotic multi-cellular organisms of the kingdom Plantae, characteristically producing embryos, containing chloroplasts, having cellulose cell walls and lacking locomotion. As used herein, a “plant” includes any plant or part of a plant at any stage of development, including seeds, suspension cultures, plant cells, embryos, meristematic regions, callus tissue, leaves, roots, shoots, gametophytes, sporophytes, pollen, microspores, and progeny thereof. Also included are cuttings, and cell or tissue cultures. As used in conjunction with the present disclosure, plant tissue includes, for example, whole plants, plant cells, plant organs, e.g., leafs, stems, roots, meristems, plant seeds, protoplasts, callus, cell cultures, and any groups of plant cells organized into structural and/or functional units.

[0241] Any plant cell may be used in the present disclosure so long as it remains viable after being transformed with a sequence of nucleic acids. Preferably, the plant cell is not adversely affected by the transduction of the necessary nucleic acid sequences, the subsequent expression of the proteins or the resulting intermediates.

[0242] As disclosed herein, a broad range of plant types may be modified to incorporate an TET1-like protein of the present disclosure. Suitable plants that may be modified include both monocotyledonous (monocot) plants and dicotyledonous (dicot) plants.

[0243] Examples of suitable plants may include, for example, species of the Family Gramineae, including Sorghum bicolor and Zea mays; species of the genera: Cucurbita, Rosa, Vitis, Juglans, Fragaria, Lotus, Medicago, Onobrychis, Trifolium, Trigonella, Vigna, Citrus, Linum, Geranium, Manihot, Daucus, Arabidopsis, Brassica, Raphanus, Sinapis, Atropa, Capsicum, Datura, Hyoscyamus, Lycopersicon, Nicotiana, Solanum, Petunia, Digitalis, Majorana, Ciahorium, Helianthus, Lactuca, Bromus, Asparagus, Antirrhinum, Heterocallis, Nemesis, Pelargonium, Panieum, Pennisetum, Ranunculus, Senecio, Salpiglossis, Cucumis, Browaalia, Glycine, Pisum, Phaseolus, Lolium, Oryza, Avena, Hordeum, Secale, and Triticum.

[0244] In some embodiments, plant cells may include, for example, those from corn (Zea mays), canola (Brassica napus, Brassica rapa ssp.), Brassica species useful as sources of seed oil, alfalfa (Medicago sativa), rice (Oryza sativa), rye (Secale cereale), sorghum (Sorghum bicolor, Sorghum vulgare), millet (e.g., pearl millet (Pennisetum glaucum), proso millet (Panicum miliaceum), foxtail millet (Setaria italica), finger millet (Eleusine coracana)), sunflower (Helianthus annuus), safflower (Carthamus tinctorius), wheat (Triticum aestivum), duckweed (Lemna), soybean (Glycine max), tobacco (Nicotiana tabacum), potato (Solanum tuberosum), peanuts (Arachis hypogaea), cotton (Gossypium barbadense, Gossypium hirsutum), sweet potato (Ipomoea batatus), cassava (Manihot esculenta), coffee (Coffea spp.), coconut (Cocos nucijra), pineapple (Ananas comosus), citrus trees (Citrus spp.), cocoa (Theobroma cacao), tea (Camellia sinensis), banana (Musa spp.), avocado (Persea americana), fig (Ficus casica), guava (Psidium guajava), mango (Mangifera indica), olive (Olea europaea), papaya (Carica papaya), cashew (Anacardium occidentale), macadamia (Macadamia spp.), almond (Prunus amygdalus), sugar beets (Beta vulgaris), sugarcane (Saccharum spp.), oats, barley, vegetables, ornamentals, and conifers.

[0245] Examples of suitable vegetables plants may include, for example, tomatoes (Lycopersicon esculentum), lettuce (e.g., Lactuca sativa), green beans (Phaseolus vulgaris), lima beans (Phaseolus limensis), peas (Lathyrus spp.), and members of the genus Cucumis such as cucumber (C. sativus), cantaloupe (C. cantalupensis), and musk melon (C. melo).

[0246] Examples of suitable ornamental plants may include, for example, azalea (Rhododendron spp.), hydrangea (Macrophylla hydrangea), hibiscus (Hibiscus rosasanensis), roses (Rosa spp.), tulips (Tulipa spp.), daffodils (Narcissus spp.), petunias (Petunia hybrida), carnation (Dianthus caryophyllus), poinsettia (Euphorbiapulcherrima), and chrysanthemum.

[0247] Examples of suitable conifer plants may include, for example, loblolly pine (Pinus taeda), slash pine (Pinus elliotii), ponderosa pine (Pinus ponderosa), lodgepole pine (Pinus contorta), Monterey pine (Pinus radiata), Douglas-fir (Pseudotsuga menziesii), Western hemlock (Isuga canadensis), Sitka spruce (Picea glauca), redwood (Sequoia sempervirens), silver fir (Abies amabilis), balsam fir (Abies balsamea), Western red cedar (Thuja plicata), and Alaska yellow-cedar (Chamaecyparis nootkatensis).

[0248] Examples of suitable leguminous plants may include, for example, guar, locust bean, fenugreek, soybean, garden beans, cowpea, mungbean, lima bean, fava bean, lentils, chickpea, peanuts (Arachis sp.), crown vetch (Vicia sp.), hairy vetch, adzuki bean, lupine (Lupinus sp.), trifolium, common bean (Phaseolus sp.), field bean (Pisum sp.), clover (Melilotus sp.) Lotus, trefoil, lens, and false indigo.

[0249] Examples of suitable forage and turf grass may include, for example, alfalfa (Medicago s sp.), orchard grass, tall fescue, perennial ryegrass, creeping bent grass, and redtop.

[0250] Examples of suitable crop plants and model plants may include, for example, Arabidopsis, corn, rice, alfalfa, sunflower, canola, soybean, cotton, peanut, sorghum, wheat, tobacco, and lemna.

[0251] The plants of the present disclosure may be genetically modified in that recombinant nucleic acids have been introduced into the plants, and as such the genetically modified plants do not occur in nature. A suitable plant of the present disclosure is one capable of expressing one or more nucleic acid constructs encoding one or more recombinant proteins. The recombinant proteins encoded by the nucleic acids may be e.g. TET1-like proteins.

[0252] As used herein, the terms “transgenic plant” and “genetically modified plant” are used interchangeably and refer to a plant which contains within its genome a recombinant nucleic acid. Generally, the recombinant nucleic acid is stably integrated within the genome such that the polynucleotide is passed on to successive generations. However, in certain embodiments, the recombinant nucleic acid is transiently expressed in the plant. The recombinant nucleic acid may be integrated into the genome alone or as part of a recombinant expression cassette. “Transgenic” is used herein to include any cell, cell line, callus, tissue, plant part or plant, the genotype of which has been altered by the presence of exogenous nucleic acid including those transgenics initially so altered as well as those created by sexual crosses or asexual propagation from the initial transgenic.

[0253] “Recombinant nucleic acid” or “heterologous nucleic acid” or “recombinant polynucleotide” as used herein refers to a polymer of nucleic acids wherein at least one of the following is true: (a) the sequence of nucleic acids is foreign to (i.e., not naturally found in) a given host cell; (b) the sequence may be naturally found in a given host cell, but in an unnatural (e.g., greater than expected) amount; or (c) the sequence of nucleic acids contains two or more subsequences that are not found in the same relationship to each other in nature. For example, regarding instance (c), a recombinant nucleic acid sequence will have two or more sequences from unrelated genes arranged to make a new functional nucleic acid. Specifically, the present disclosure describes the introduction of an expression vector into a plant cell, where the expression vector contains a nucleic acid sequence coding for a protein that is not normally found in a plant cell or contains a nucleic acid coding for a protein that is normally found in a plant cell but is under the control of different regulatory sequences. With reference to the plant cell's genome, then, the nucleic acid sequence that codes for the protein is recombinant. A protein that is referred to as recombinant generally implies that it is encoded by a recombinant nucleic acid sequence which may be present in the plant cell. Recombinant proteins of the present disclosure may also be exogenously supplied directly to host cells (e.g. plant cells).

[0254] A “recombinant” polypeptide, protein, or enzyme of the present disclosure, is a polypeptide, protein, or enzyme that is encoded by a “recombinant nucleic acid” or “heterologous nucleic acid” or “recombinant polynucleotide.”

[0255] In some embodiments, the genes encoding the recombinant proteins in the plant cell may be heterologous to the plant cell. In certain embodiments, the plant cell does not naturally produce the recombinant proteins, and contains heterologous nucleic acid constructs capable of expressing one or more genes necessary for producing those molecules. In certain embodiments, the plant cell does not naturally produce one or more polypeptides of the present disclosure, and is provided the one or more polypeptides through exogenous delivery of the polypeptides directly to the plant cell without the need to express a recombinant nucleic acid encoding the recombinant polypeptide in the plant cell.

[0256] Recombinant nucleic acids and/or recombinant proteins of the present disclosure may be present in host cells (e.g. plant cells). In some embodiments, recombinant nucleic acids are present in an expression vector, and the expression vector may be present in host cells (e.g. plant cells).

[0257] Expression of Recombinant Proteins in Plants

[0258] A TET-like protein (e.g. TET1-like protein) of the present disclosure may be introduced into plant cells via any suitable methods known in the art. For example, a TET-like protein (e.g. TET1-like protein) can be exogenously added to plant cells and the plant cells are maintained under conditions such that the TET-like protein (e.g. TET1-like protein) is targeted to one or more target nucleic acids and reduces the methylation of the target nucleic acids in the plant cells. Alternatively, a recombinant nucleic acid encoding a TET-like protein (e.g. TET1-like protein) of the present disclosure can be expressed in plant cells and the plant cells are maintained under conditions such that the TET-like protein (e.g. TET1-like protein) of the present disclosure is targeted to one or more target nucleic acids and reduces the methylation of the target gene in the plant cells. Additionally, in some embodiments, a TET-like protein (e.g. TET1-like protein) of the present disclosure may be transiently expressed in a plant via viral infection of the plant, or by introducing a TET-like (e.g. TET1-like) protein-encoding RNA into a plant to reduce the methylation of a target nucleic acid of interest. Methods of introducing recombinant proteins via viral infection or via the introduction of RNAs into plants are well known in the art. For example, Tobacco rattle virus (TRV) has been successfully used to introduce zinc finger nucleases in plants to cause genome modification (“Nontransgenic Genome Modification in Plant Cells”, Plant Physiology 154:1079-1087 (2010)).

[0259] A recombinant nucleic acid encoding a TET-like protein (e.g. TET1-like protein) of the present disclosure can be expressed in a plant with any suitable plant expression vector. Typical vectors useful for expression of recombinant nucleic acids in higher plants are well known in the art and include, for example, vectors derived from the tumor-inducing (Ti) plasmid of Agrobacterium tumefaciens (e.g., see Rogers et al., Meth. in Enzymol. (1987) 153:253-277). These vectors are plant integrating vectors in that on transformation, the vectors integrate a portion of vector DNA into the genome of the host plant. Exemplary A. tumefaciens vectors useful herein are plasmids pKYLX6 and pKYLX7 (e.g., see of Schardl et al., Gene (1987) 61:1-11; and Berger et al., Proc. Natl. Acad. Sci. USA (1989) 86:8402-8406); and plasmid pBI 101.2 that is available from Clontech Laboratories, Inc. (Palo Alto, Calif.).

[0260] In addition to regulatory domains, a TET-like protein (e.g. TET1-like protein) of the present disclosure can be expressed as a fusion protein that is coupled to, for example, a maltose binding protein (“MBP”), glutathione S transferase (GST), hexahistidine, c-myc, or the FLAG epitope for ease of purification, monitoring expression, or monitoring cellular and subcellular localization.

[0261] Moreover, a recombinant nucleic acid encoding a TET-like protein (e.g. TET1-like protein) of the present disclosure can be modified to improve expression of the recombinant protein in plants by using codon preference. When the recombinant nucleic acid is prepared or altered synthetically, advantage can be taken of known codon preferences of the intended plant host where the nucleic acid is to be expressed. For example, recombinant nucleic acids of the present disclosure can be modified to account for the specific codon preferences and GC content preferences of monocotyledons and dicotyledons, as these preferences have been shown to differ (Murray et al., Nucl. Acids Res. (1989) 17: 477-498).

[0262] In some embodiments, a TET-like protein (e.g. TET1-like protein) of the present disclosure can be used to create functional “overexpression” mutations in a plant by releasing repression of the target gene expression as a consequence of the reduced methylation of the target nucleic acid. Release of gene expression repression, which may lead to activation of gene expression, may be of a structural gene, e.g., one encoding a protein having for example enzymatic activity, or of a regulatory gene, e.g., one encoding a protein that in turn regulates expression of a structural gene.

[0263] The present disclosure further provides expression vectors encoding TET-like proteins (e.g. TET1-like proteins). A nucleic acid sequence coding for the desired recombinant nucleic acid of the present disclosure can be used to construct a recombinant expression vector which can be introduced into the desired host cell. A recombinant expression vector will typically contain a nucleic acid encoding a recombinant protein of the present disclosure, operably linked to transcriptional initiation regulatory sequences which will direct the transcription of the nucleic acid in the intended host cell, such as tissues of a transformed plant.

[0264] For example, plant expression vectors may include (1) a cloned gene under the transcriptional control of 5′ and 3′ regulatory sequences and (2) a dominant selectable marker. Such plant expression vectors may also contain, if desired, a promoter regulatory region (e.g., one conferring inducible or constitutive, environmentally- or developmentally-regulated, or cell- or tissue-specific/selective expression), a transcription initiation start site, a ribosome binding site, an RNA processing signal, a transcription termination site, and/or a polyadenylation signal.

[0265] A plant promoter, or functional fragment thereof, can be employed to control the expression of a recombinant nucleic acid of the present disclosure in regenerated plants. The selection of the promoter used in expression vectors will determine the spatial and temporal expression pattern of the recombinant nucleic acid in the modified plant, e.g., the nucleic acid encoding the TET-like protein (e.g. TET1-like protein) of the present disclosure is only expressed in the desired tissue or at a certain time in plant development or growth. Certain promoters will express recombinant nucleic acids in all plant tissues and are active under most environmental conditions and states of development or cell differentiation (i.e., constitutive promoters). Other promoters will express recombinant nucleic acids in specific cell types (such as leaf epidermal cells, mesophyll cells, root cortex cells) or in specific tissues or organs (roots, leaves or flowers, for example) and the selection will reflect the desired location of accumulation of the gene product. Alternatively, the selected promoter may drive expression of the recombinant nucleic acid under various inducing conditions.

[0266] Examples of suitable constitutive promoters may include, for example, the core promoter of the Rsyn7, the core CaMV 35S promoter (Odell et al., Nature (1985) 313:810-812), CaMV 19S (Lawton et al., 1987), rice actin (Wang et al., 1992; U.S. Pat. No. 5,641,876; and McElroy et al., Plant Cell (1985) 2:163-171); ubiquitin (Christensen et al., Plant Mol. Biol. (1989)12:619-632; and Christensen et al., Plant Mol. Biol. (1992) 18:675-689), pEMU (Last et al., Theor. Appl. Genet. (1991) 81:581-588), MAS (Velten et al., EMBO J. (1984) 3:2723-2730), nos (Ebert et al., 1987), Adh (Walker et al., 1987), the P- or 2′-promoter derived from T-DNA of Agrobacterium tumefaciens, the Smas promoter, the cinnamyl alcohol dehydrogenase promoter (U.S. Pat. No. 5,683,439), the Nos promoter, the pEmu promoter, the rubisco promoter, the GRP 1-8 promoter, and other transcription initiation regions from various plant genes known to those of skilled artisans, and constitutive promoters described in, for example, U.S. Pat. Nos. 5,608,149; 5,608,144; 5,604,121; 5,569,597; 5,466,785; 5,399,680; 5,268,463; and 5,608,142. In some embodiments, expression of a nucleic acid of the present disclosure (e.g. a nucleic acid encoding a TET1-like protein) may be driven (in operable linkage) with a UBQ10 promoter.

[0267] Examples of suitable tissue specific promoters may include, for example, the lectin promoter (Vodkin et al., 1983; Lindstrom et al., 1990), the corn alcohol dehydrogenase 1 promoter (Vogel et al., 1989; Dennis et al., 1984), the corn light harvesting complex promoter (Simpson, 1986; Bansal et al., 1992), the corn heat shock protein promoter (Odell et al., Nature (1985) 313:810-812; Rochester et al., 1986), the pea small subunit RuBP carboxylase promoter (Poulsen et al., 1986; Cashmore et al., 1983), the Ti plasmid mannopine synthase promoter (Langridge et al., 1989), the Ti plasmid nopaline synthase promoter (Langridge et al., 1989), the petunia chalcone isomerase promoter (Van Tunen et al., 1988), the bean glycine rich protein 1 promoter (Keller et al., 1989), the truncated CaMV 35s promoter (Odell et al., Nature (1985) 313:810-812), the potato patatin promoter (Wenzler et al., 1989), the root cell promoter (Conkling et al., 1990), the maize zein promoter (Reina et al., 1990; Kriz et al., 1987; Wandelt and Feix, 1989; Langridge and Feix, 1983; Reina et al., 1990), the globulin-1 promoter (Belanger and Kriz et al., 1991), the α-tubulin promoter, the cab promoter (Sullivan et al., 1989), the PEPCase promoter (Hudspeth & Grula, 1989), the R gene complex-associated promoters (Chandler et al., 1989), and the chalcone synthase promoters (Franken et al., 1991).

[0268] Alternatively, the plant promoter can direct expression of a recombinant nucleic acid of the present disclosure in a specific tissue or may be otherwise under more precise environmental or developmental control. Such promoters are referred to here as “inducible” promoters. Environmental conditions that may affect transcription by inducible promoters include, for example, pathogen attack, anaerobic conditions, or the presence of light. Examples of inducible promoters include, for example, the Adhl promoter which is inducible by hypoxia or cold stress, the Hsp70 promoter which is inducible by heat stress, and the PPDK promoter which is inducible by light. Examples of promoters under developmental control include, for example, promoters that initiate transcription only, or preferentially, in certain tissues, such as leaves, roots, fruit, seeds, or flowers. An exemplary promoter is the anther specific promoter 5126 (U.S. Pat. Nos. 5,689,049 and 5,689,051). The operation of a promoter may also vary depending on its location in the genome. Thus, an inducible promoter may become fully or partially constitutive in certain locations.

[0269] Moreover, any combination of a constitutive or inducible promoter, and a non-tissue specific or tissue specific promoter may be used to control the expression of a TET-like protein (e.g. TET1-like protein) of the present disclosure.

[0270] The recombinant nucleic acids of the present disclosure and/or a vector housing a recombinant nucleic acid of the present disclosure, may also contain a regulatory sequence that serves as a 3′ terminator sequence. One of skill in the art would readily recognize a variety of terminators that may be used in the recombinant nucleic acids of the present disclosure. For example, a recombinant nucleic acid of the present disclosure may contain a 3′ NOS terminator. Further, a native terminator from a TET protein (e.g. a TET1 protein) of the present disclosure may also be used in the recombinant nucleic acids of the present disclosure.

[0271] Plant transformation protocols as well as protocols for introducing recombinant nucleic acids of the present disclosure into plants may vary depending on the type of plant or plant cell, e.g., monocot or dicot, targeted for transformation. Suitable methods of introducing recombinant nucleic acids of the present disclosure into plant cells and subsequent insertion into the plant genome include, for example, microinjection (Crossway et al., Biotechniques (1986) 4:320-334), electroporation (Riggs et al., Proc. Natl. Acad Sci. USA (1986) 83:5602-5606), Agrobacterium-mediated transformation (U.S. Pat. No. 5,563,055), direct gene transfer (Paszkowski et al., EMBO J. (1984) 3:2717-2722), and ballistic particle acceleration (U.S. Pat. No. 4,945,050; Tomes et al. (1995). “Direct DNA Transfer into Intact Plant Cells via Microprojectile Bombardment,” in Plant Cell, Tissue, and Organ Culture: Fundamental Methods, ed. Gamborg and Phillips (Springer-Verlag, Berlin); and McCabe et al., Biotechnology (1988) 6:923-926).

[0272] Additionally, a TET-like protein (e.g. TET1-like protein) of the present disclosure can be targeted to a specific organelle within a plant cell. Targeting can be achieved by providing the recombinant protein with an appropriate targeting peptide sequence. Examples of such targeting peptides include, for example, secretory signal peptides (for secretion or cell wall or membrane targeting), plastid transit peptides, chloroplast transit peptides, mitochondrial target peptides, vacuole targeting peptides, nuclear targeting peptides, and the like (e.g., see Reiss et al., Mol. Gen. Genet. (1987) 209(1):116-121; Settles and Martienssen, Trends Cell Biol (1998) 12:494-501; Scott et al., J Biol Chem (2000) 10:1074; and Luque and Correas, J Cell Sci (2000) 113:2485-2495).

[0273] The modified plant may be grown into plants in accordance with conventional ways (e.g., see McCormick et al., Plant Cell. Reports (1986) 81-84.). These plants may then be grown, and pollinated with either the same transformed strain or different strains, with the resulting hybrid having the desired phenotypic characteristic. Two or more generations may be grown to ensure that the subject phenotypic characteristic is stably maintained and inherited and then seeds harvested to ensure the desired phenotype or other property has been achieved.

### Methods of Reducing Methylation of a Target Nucleic Acid in Plants

[0274] Growing conditions sufficient for the recombinant TET-like polypeptides (e.g. TET1-like polypeptides) of the present disclosure to be expressed in the plant to be targeted to and reduce the methylation of one or more target nucleic acids of the present disclosure are well known in the art and include any suitable growing conditions disclosed herein. Typically, the plant is grown under conditions sufficient to express a recombinant polypeptide of the present disclosure (e.g. TET1-like proteins), and for the expressed recombinant polypeptide to be localized to the nucleus of cells of the plant in order to be targeted to and reduce the methylation of the target nucleic acids. Generally, the conditions sufficient for the expression of the recombinant polypeptide will depend on the promoter used to control the expression of the recombinant polypeptide. For example, if an inducible promoter is utilized, expression of the recombinant polypeptide in a plant will require that the plant to be grown in the presence of the inducer.

[0275] As noted above, growing conditions sufficient for the recombinant polypeptides of the present disclosure to be expressed in the plant to be targeted to and reduce methylation and/or activate or reduce the expression of one or more target nucleic acids may vary depending on a number of factors (e.g. species of plant, use of inducible promoter, etc.). Suitable growing conditions may include, for example, ambient environmental conditions, standard greenhouse conditions, growth in long days under standard environmental conditions (e.g. 16 hours of light, 8 hours of dark), growth in 12 hour light:12 hour dark day/night cycles, etc.

[0276] Various time frames may be used to observe activation in expression and/or targeted demethylation of a target nucleic acid according to the methods of the present disclosure. Plants may be observed/assayed for activation in expression and/or targeted demethylation of a target nucleic acid after, for example, about 5 days of growth, about 10 days of growth, about 15 days after growth, about 20 days after growth, about 25 days after growth, about 30 days after growth, about 35 days after growth, about 40 days after growth, about 50 days after growth, or 55 days or more of growth.

[0277] Reduced methylation of a target nucleic acid induced by targeting a TET-like protein (e.g. TET1-like protein) to the target nucleic acid may be stable in plants even in the absence of the TET-like protein (e.g. TET1-like protein) in the plant. Accordingly, the methods of the present disclosure may allow one or more target nucleic acids in a plant to maintain a reduced level of methylation after a nucleic acid encoding a TET-like protein (e.g. TET1-like protein) has been crossed out or otherwise removed from the plant. For example, after targeting a particular genomic region with a TET-like protein (e.g. TET1-like protein) protein according to the methods of the present disclosure, the reduced level of methylation of the targeted region may remain stable even after crossing away the transgenes. It is an object of the present disclosure to provide plants having reduced methylation of one or more target nucleic acids according to the methods of the present disclosure. As the methods of the present disclosure may allow one or more target nucleic acids in a plant to remain in their state of reduced methylation after a recombinant polynucleotide encoding a TET-like protein (e.g. TET1-like protein) of the present disclosure has been crossed out of the plant, the progeny plants of these plants may have reduced methylation of one or more target nucleic acids even in the absence of the recombinant polynucleotides that produce the recombinant polypeptides of the present disclosure.

[0278] A target nucleic acid of the present disclosure in a plant cell housing a TET-like protein (e.g. TET1-like protein) of the present disclosure may have its level of methylation reduced by at least about 5%, at least about 10%, at least about 15%, at least about 20%, at least about 25%, at least about 30%, at least about 40%, at least about 50%, at least about 55%, at least about 60%, at least about 65%, at least about 70%, at least about 75%, at least about 80%, at least about 85%, at least about 90%, at least about 91%, at least about 92%, at least about 93%, at least about 94%, at least about 95%, at least about 96%, at least about 97%, at least about 98%, at least about 99%, or at least about 100% as compared to a corresponding control. Various controls will be readily apparent to one of skill in the art. For example, a control may be a corresponding plant or plant cell that does not contain a nucleic acid encoding a TET-like protein (e.g. TET1-like protein) of the present disclosure.

[0279] A target nucleic acid of the present disclosure having reduced methylation as compared to a corresponding control nucleic acid may exhibit a reduction in methylation over a number of nucleotides including and adjacent to the targeted nucleotide sequences in a target nucleic acid. For example, the reduction in methylation may be present over one nucleotide, over about 5 nucleotides, over about 10 nucleotides, over about 15 nucleotides, over about 20 nucleotides, over about 25 nucleotides, over about 30 nucleotides, over about 35 nucleotides, over about 40 nucleotides, over about 45 nucleotides, over about 50 nucleotides, over about 55 nucleotides, over about 60 nucleotides, over about 75 nucleotides, over about 100 nucleotides, over about 125 nucleotides, over about 150 nucleotides, over about 175 nucleotides, over about 200 nucleotides, over about 225 nucleotides, over about 250 nucleotides, over about 275 nucleotides, over about 300 nucleotides, over about 350 nucleotides, over about 400 nucleotides, over about 450 nucleotides, over about 500 nucleotides, over about 600 nucleotides, over about 700 nucleotides, over about 800 nucleotides, over about 900 nucleotides, over about 1,000 nucleotides, over about 1,500 nucleotides, over about 2,000 nucleotides, over about 2,500 nucleotides, or over about 3,000 nucleotides or more as compared to corresponding nucleotides in a corresponding control nucleic acid. The reduction in methylation of nucleotides adjacent to the target nucleotides in the target nucleic acid may occur in nucleotides that are 5′ to the target nucleotide sequences, 3′ to the target nucleotides sequences, or both 5′ and 3′ to the target nucleotide sequences.

[0280] A target nucleic acid of the present disclosure may have its expression upregulated/activated as compared to a corresponding control nucleic acid. A target nucleic acid may have its expression upregulated at least about 1-fold, at least about 2-fold, at least about 3-fold, at least about 4-fold, at least about 5-fold, at least about 10-fold, at least about 15-fold, at least about 20-fold, at least about 25-fold, at least about 30-fold, at least about 40-fold, at least about 50-fold, at least about 75-fold, at least about 100-fold, at least about 150-fold, at least about 200-fold, at least about 300-fold, at least about 400-fold, at least about 500-fold, at least about 600-fold, at least about 700-fold, at least about 800-fold, at least about 900-fold, at least about 1,000-fold, at least about 1,250-fold, at least about 1,500-fold, at least about 1,750-fold, at least about 2,000-fold, at least about 2,500-fold, at least about 3,000-fold, at least about 3,500-fold or more as compared to a corresponding control nucleic acid. As stated above, various controls will be readily apparent to one of skill in the art. For example, a control nucleic acid may be a corresponding nucleic acid from a plant or plant cell that does not contain a nucleic acid encoding a TET-like protein (e.g. TET1-like protein) of the present disclosure.

[0281] A target nucleic acid of the present disclosure may have its expression downregulated/reduced, or silenced, as compared to a corresponding control nucleic acid. A target nucleic acid may have its expression reduced by at least about 1-fold, at least about 2-fold, at least about 3-fold, at least about 4-fold, at least about 5-fold, at least about 10-fold, at least about 15-fold, at least about 20-fold, at least about 25-fold, at least about 30-fold, at least about 40-fold, at least about 50-fold, at least about 75-fold, at least about 100-fold, at least about 150-fold, at least about 200-fold, at least about 300-fold, at least about 400-fold, at least about 500-fold, at least about 600-fold, at least about 700-fold, at least about 800-fold, at least about 900-fold, at least about 1,000-fold, at least about 1,250-fold, at least about 1,500-fold, at least about 1,750-fold, at least about 2,000-fold, at least about 2,500-fold, at least about 3,000-fold, at least about 3,500-fold or more as compared to a corresponding control nucleic acid. As stated above, various controls will be readily apparent to one of skill in the art. For example, a control nucleic acid may be a corresponding nucleic acid from a plant or plant cell that does not contain a nucleic acid encoding a TET-like protein (e.g. TET1-like protein) of the present disclosure.

[0282] Methods of probing the methylation status of a nucleic acid are well-known to those of skill in the art. For example, bisulfite sequencing and nucleic acid analysis may be used to determine the methylation status, on a nucleotide-by-nucleotide basis, of a population of nucleic acids isolated from a nucleic acid-containing sample (e.g. plants, plant tissues, or plant cells).

[0283] It is to be understood that while the present disclosure has been described in conjunction with the preferred specific embodiments thereof, the foregoing description is intended to illustrate and not limit the scope of the present disclosure. Other aspects, advantages, and modifications within the scope of the present disclosure will be apparent to those skilled in the art to which the present disclosure pertains.

### EXAMPLES

[0284] The following examples are offered to illustrate provided embodiments and are not intended to limit the scope of the present disclosure.

### Example 1

### DNA-Binding Domain-Targeting of Demethylation Factor TET1 (Catalytic Domain) to the FWA Locus in Arabidopsis

[0285] This Example demonstrates the targeting of the catalytic domain of a TET1 protein to a specific locus to cause DNA demethylation in plants.

### Introduction

[0286] DNA methylation controls gene expression in many different organisms, including plants. Applicant has previously shown that artificial zinc fingers (AZF) can be used for targeted methylation and repression of gene expression in Arabidopsis (Johnson et al, 2014). Using the same AZF, ZF108, this Example demonstrates targeted DNA demethylation in Arabidopsis. To do so, the catalytic domain of TET1, a protein involved in DNA demethylation in mammals (Ito et al, 2011, Gue et al, 2011) was heterologously fused to ZF108.

[0287] The TET1 catalytic domain has been shown to cause DNA demethylation in other organisms when artificially targeted to genomic locations using Artificial Zinc Fingers, Tal effectors and CRISPR/Cas9. However, such a method has not been shown to work in plants. Moreover, given that TET1 is not a native plant protein and given that plant DNA methylation is in many ways different from animal DNA methylation, it was not known that such a method could even work in plants.

[0288] In the present Example, Applicant fused the catalytic domain of TET1 to the C-terminal tail of ZF108 and expressed this fusion protein under the control of the constitutive promoter UBQ10 in wild-type Arabidopsis plants. TET1 catalytic domain was amplified from the pJFA334E9 plasmid provided by the Joung lab through Addgene. Importantly, ZF108 was designed to bind to the promoter of the reporter gene FWA in Arabidopsis (Johnson et al, 2013). In wild-type plants, this gene is repressed due to DNA methylation in its promoter. Absence of methylation causes FWA overexpression and an associated late flowering phenotype. Therefore, wild-type plants expressing the chimeric protein ZF108-TET1 (catalytic domain) were screened for a late flowering phenotype, indicative of FWA overexpression and a likely consequence of promoter de-methylation. From this screen, Applicant identified plants exhibiting a late flowering phenotype as compared to wild-type plants. Following identification of these late flowering plants, their DNA was extracted and digested with the methylation-sensitive restriction enzyme McrBC. The results demonstrated that plants expressing ZF108-TET1 (catalytic domain) had low methylation at the FWA promoter compared to wild type. Whole-genome Bisulfite Sequencing was performed to analyze the impact of ZF108-TET1 (catalytic domain) genome-wide. Finally, gene expression of the same samples was analyzed by RNA-seq in order to observe potential changes in gene expression due to demethylation.

### Materials and Methods

[0289] Cloning of pUBQ10::ZF_3xFlag_TET1-CD

[0290] For this purpose, a modified pMDC123 plasmid (Curtis et al, 2003, Plant Phys) was created first, containing 1990 bp of the promoter region of Arabidopsis UBQ10 gene upstream of the BLRP_ZF108_3xFlag cassette. Both UBQ10 promoter and BLRP_ZF108_3xFlag are upstream of the gateway cassette (Invitrogen) present in the original pMDC123 plasmid. The catalytic domain of the human TET1 protein (TET1-CD) was amplified from the plasmid pJFA334E9 (Addgene) and cloned into pENTR/D plasmid (Invitrogen) and then delivered into the modified pMDC123 by LR reaction (Invitrogen), creating an in-frame fusion of TET1_CD cDNA with the upstream BLRP_ZF108_3xFlag cassette.

[0291] The nucleotide sequence of pUBQ10::ZF108_3xFlag_TET1-CD is presented in SEQ ID NO: 21. This expression cassette contains a UBQ10 promoter (SEQ ID NO: 22), the ZF108 DNA-binding domain that targets the FWA promoter (SEQ ID NO: 23), a 3X Flag tag (SEQ ID NO: 24), the catalytic domain of human TET1 (SEQ ID NO: 25), and an OCS terminator sequence (SEQ ID NO: 26). The pUBQ10::ZF108_3xFlag_TET1-CD expression cassette encodes the ZF108_3xFlag_TET1-CD fusion protein, whose amino acid sequence set forth in SEQ ID NO: 27. Polypeptides in the fusion protein include ZF108 (SEQ ID NO: 28), 3xFlag (SEQ ID NO: 29), and human TET1-CD (SEQ ID NO: 30).

[0292] Plant Transformation and Flowering Time Measurement

[0293] The construct above was introduced into Col-0 wild-type Arabidopsis thaliana plants using Agrobacterium-mediated transformation. T1 transgenic plants were selected based on their resistance to BASTA. Following selection, plants were grown on soil under a long day photoperiod until the plants flowered. Flowering time was scored by measuring the number of rosette and caulinar leaves.

[0294] CHOP-PCR

[0295] Plant DNA was extracted following a CTAB-based protocol. 1 μg DNA was digested with the methylation sensitive enzyme McrBC for 4 h at 37° C. As a non-digested control, 1 μg of DNA was incubated for 4 h at 37° C. in digestion buffer without the enzyme. Quantitative Real-time PCR was done to amplify a region of the FWA promoter using the oligos (ttgggtttagtgtttacttg) (SEQ ID NO: 167) and (gaatgttgaatgggataaggta) (SEQ ID NO: 168). As a control region, the gene body of another gene was analyzed using the oligos (tgcaatttgtctgcttgctaatg) (SEQ ID NO: 169) and (tcatttataatggacgatgcc) (SEQ ID NO: 170). After PCR, the ratio of digested over non-digested DNA was calculated.

[0296] Bisulfite Sequencing and Data Analysis

[0297] BS-Seq libraries were generated as previously reported (Cokus et al., 2008) and all libraries were sequenced using the HiSeq 2000 platform following manufacturer instructions (I lumina) at a length of 50 bp. Bisulfite-Seq (BS-Seq) reads were aligned to the TAIR10 version of the Arabidopsis thaliana reference genome using BS-seeker. For BS-Seq, up to 2 mismatches were allowed and only uniquely mapped reads were used.

[0298] RNA-seq

[0299] Raw reads in qseq format obtained from the sequencer were first converted to fastq format with a customized perl script. Read quality was controlled with FastQC (http://www.bioinformatics.babraham.ac.uk/projects/fastqc). High quality reads were then aligned to hg19 reference genome using Tophat (Trapnell et al, 2009) (v 2.0.13) by using ‘-no-coverage-search’ option, allowing up to two mismatches and only keeping reads that mapped to one location. Essentially, reads were first mapped to TAIR10 gene annotation with known splice junction. When reads did not map to the annotated genes, the reads were mapped to hg19 genome. The number of reads mapping to genes were calculated by HTseq (Anders et al., 2015) (v 0.5.4) with default parameters. Expression levels were determined by RPKM (reads per kilobase of exons per million aligned reads) in R using customized scripts.

### Results

[0300] To explore whether ZF108_TET1-CD would be able to trigger demethylation and reactivate the expression of FWA, wild-type Col-0 plants were transformed with the ZF108_TET1-CD containing construct described above. Flowering time of T1 transgenic plants was assayed, and results are presented below in Table 1A.

TABLE 1A
Flowering Time Results

| | Early | Late |
|---|---|---|
| Line | flowering | flowering |
| ZF108_TET1_CD | 32 | 25 |

[0301] The results presented in Table 1A demonstrate that the catalytic domain of human TET1 fused to a zinc finger that targets the FWA locus can efficiently promote late flowering in wild-type plants. A more through assessment of these results is presented in FIG. 1. From FIG. 1, it is seen that wild-type Col-0 plants exhibit their normal “early” flowering time. In contrast, fwa mutants, which contain an epimutation in the FWA promoter that results in loss of methylation at the FWA promoter and consequent activation/expression of FWA (a flowering time repressor), exhibit their canonical “late” flowering time phenotype. Interestingly, a number of plants carrying the ZF108_TET1-CD construct in the Col-0 genetic background exhibited a “late” flowering phenotype more analogous to fwa mutants, suggesting that this construct can promote late flowering in otherwise wild-type plants.

[0302] In order to analyze whether the late flowering phenotype of plants harboring ZF108_TET1-CD as described in Table 1A was due to de-methylation of the FWA promoter, CHOP-PCR using the methylation sensitive enzyme McrBC was performed on DNA obtained from these plants. As shown in FIG. 2, the digested/non-digested profile for the FWA promoter in plants harboring the ZF108_TET1-CD construct is similar to the FWA promoter profile for fwa-4 plants, indicative of a lack of DNA methylation at the FWA promoter. However, while fwa-4 plants show demethylation also at the control region analyzed, the ZF108_TET1-CD lines show a profile at the control region that is similar to wild-type plants, suggesting that demethylation is happening specifically at the FWA promoter.

[0303] To further investigate the loss of methylation at the FWA promoter that appeared to be conferred by ZF108_TET1-CD, a whole-genome bisulfite sequencing assay was performed in four independent ZF108_TET1-CD lines that showed the late flowering phenotype. Bisulfite sequencing experiments were conducted as described above. The results, which are presented in FIG. 3 and FIG. 4, show that effective DNA demethylation was achieved by targeting the TET1 catalytic domain to the FWA promoter. Importantly, this effect was specific to the FWA promoter, and other methylated regions in the general vicinity of the targeted genomic region were not affected (FIG. 4).

[0304] In order to determine if the late flowering phenotype observed in the different ZF108_TET1-CD lines was due to the activation of FWA expression, RNA-seq was performed with four independent T1 lines. The results presented in FIG. 5 show that FWA was upregulated in all transgenic lines tested, while two control housekeeping genes remained unaffected. The results with the ZF108_TET1-CD transgenic lines were comparable to the results observed in fwa-4 plants, which are known to exhibit loss of methylation at the FWA promoter and have activated expression of FWA as compared to wild-type plants. Thus, the results presented in this Example demonstrate that specific targeting of the TETI catalytic domain to a genomic region of interest can be used to target demethylation and gene activation in plants in a very specific manner.

### Example 2

### CRISPR-Targeting of a TET1 Polypeptide to Specific Loci

[0305] This Example describes exemplary experimental guidelines for constructing fusion constructs containing TET1 polypeptides as disclosed herein fused to dCAS9 proteins. These constructs may be used to target a TETI polypeptide to a specific locus of a plant genome using the CRISPR-CAS9 system to induce de-methylation of the target nucleic acid. This particular example describes exemplary constructs to target the FWA locus.

### Materials and Methods

[0306] Construction of TET]-CD Fusion Proteins and gRNA-fwa

[0307] For this purpose, a modified pMDC123 plasmid (Curtis et al, 2003, Plant Phys) will be created first. A fragment containing 1986 bp of the promoter region of Arabidopsis UBQ10 gene will be cloned, followed by an omega RBC translational enhancer and then a human codon optimized dCAS9 creating pMDC UBQ10_dCAS9_Gateway. An attL1 site followed by an HA tag, two nuclear localization signals (NLS), the catalytic domain of TET1 protein (TET1-CD), and a attL2 site will be created through gene synthesis and inserted into pUC57 to create pUC57 attL1_1xHA_2xNLS_TET1-CD_attL2. The 1xHA_2xNLS_TET1-CD will be delivered into pMDC UBQ10_dCAS9_Gateway by LR reaction (Invitrogen) creating an in-frame fusion of 1xHA_2xNLS_TET1-CD with the upstream dCAS9 cassette creating pMDC UBQ10_dCAS9_1xHA_2xNLS_TET1-CD.

[0308] Three different gRNA expression cassettes, a gRNA cassette driven by a U6 promoter expressing a single gRNA, a tRNA-gRNA expression cassette driven by a U6 promoter with two different gRNAs, and a tRNA-gRNA expression cassette driven by a U6 promoter with four different gRNAs will be created by gene synthesis. Independent of each other, each individual gRNA system will be inserted at the Pmel restriction site of pMDC UBQ10_dCAS9_1xHA_2xNLS_TET1-CD upstream of the UBQ10 promoter creating: pMDC U6_gRNA_UBQ10_dCAS9_1xHA_2xNLS_TET1-CD, pMDC U6_tRNA-gRNAx2_UBQ10_dCAS9_1xHA_2xNLS_TET1-CD, and pMDC U6_tRNA_gRNAx4_UBQ10_dCAS9_1xHA_2xNLS_TET1-CD.

[0309] The exemplary expression cassette of UBQ10_dCAS9_1xHA_2xNLS_TET1-CD will contain a number of features. The nucleotide sequence of the expression cassette is presented in SEQ ID NO: 31. This cassette includes a UBQ10 promoter (SEQ ID NO: 32), an Omega RBC (SEQ ID NO: 33), a dCAS9 polypeptide (SEQ ID NO: 34), 1X HA tag (SEQ ID NO: 35), a nuclear localization signal (SEQ ID NO: 36), a linker (SEQ ID NO: 37), the catalytic domain of human TET1 (TET1-CD) (SEQ ID NO: 38), and an OCS terminator sequence (SEQ ID NO: 39).

[0310] The amino acid sequence of dCas9_1xHA_2xNLS_TET1-CD fusion protein is presented in SEQ ID NO: 40. The following amino acid sequences are present in this fusion protein: dCAS9 (SEQ ID NO: 41), 1X HA (SEQ ID NO: 42), 2xNLS (SEQ ID NO: 43), linker (SEQ ID NO: 44), and TET1-CD (SEQ ID NO: 45).

[0311] To target the FWA locus, various gRNA sequences will be tested, as presented in Table 2A. These gRNA sequences will be present in single gRNA cassettes as well as in a series of tRNA-gRNA expression cassettes. CRISPR-targeting technology involving tRNA-gRNA expression cassettes is described in Xie et al, PNAS (2015). This will allow for the delivery of multiple gRNAs simultaneously with high expression level.

TABLE 2A
gRNA Molecules Targeting the FWA Promoter

| gRNA | crRNA Sequence |
|---|---|
| Name | (5′ → 3′) |
| gRNA3 | ATTCTCGACGGAAAGATGTA (SEQ ID NO: 171) |
| gRNA4 | ACGGAAAGATGTATGGGCTT (SEQ ID NO: 172) |
| gRNA12 | TTCATACGAGCGCCGCTCTA (SEQ ID NO: 173) |
| gRNA14 | CCATTGGTCCAAGTGCTATT (SEQ ID NO: 174) |
| gRNA16 | GCGGCGCAAGATCTGATATT (SEQ ID NO: 175) |
| gRNA17 | AAAACTAGGCCATCCATGGA (SEQ ID NO: 176) |

[0312] One exemplary tRNA-gRNA expression cassette will contain two different gRNA molecules: gRNA4 and gRNA17. This cassette will be called U6p::tRNA-4-17, and the nucleotide sequence of this cassette is presented in SEQ ID NO: 46. Other features of this cassette include a U6 promoter (SEQ ID NO: 47), tRNA (SEQ ID NO: 48), gRNA backbone (SEQ ID NO: 49), and a PolIII terminator sequence (SEQ ID NO: 50).

[0313] Another exemplary tRNA-gRNA expression cassette will contain four different gRNA molecules: gRNA16, gRNA14, gRNA3, and gRNA17. This cassette will be called U6p::tRNA-16-14-3-17, and the nucleotide sequence of this cassette is presented in SEQ ID NO: 51. Other features of this cassette include a U6 promoter (SEQ ID NO: 47), tRNA (SEQ ID NO: 48), gRNA backbone (SEQ ID NO: 49), and a PolIII terminator sequence (SEQ ID NO: 50).

[0314] Transformation of Col-0 Plants

[0315] The construct described above will be transformed into Col-0 wild-type plants using Agrobacterium-mediated genetic transformation (after the construct is transformed into Agrobacterium). This process involves transforming plants via floral dip using methods well-known in the art.

[0316] Flowering Time Measurements

[0317] Progeny of transformed plants (T1s) will be planted and screened for BASTA-resistant plants that incorporate the T-DNA into the Arabidopsis genome, which confers resistance to BASTA. Among the BASTA-resistant transgenic plants, flowering time will be measured and compared to early-flowering wild-type Col-0 and late-flowering fwa-4 plants. Flowering time will be measured by counting the total number of leaves (rossette and cauline) of each individual plant.

[0318] Data Analysis

[0319] Plants transformed with the fusion constructs described above will be evaluated for phenotypic differences as compared to corresponding control plants (e.g. wild-type plants and fwa-4 plants) which are suggestive of successful fusion protein targeting to the locus of interest and subsequent de-methylation and/or transcriptional activation at the locus. The phenotype evaluated may vary depending on the locus targeted. Other analyses to be performed may include measuring the expression level of the targeted locus in the transformed plants, measuring the degree of DNA methylation at the targeted locus in the transformed plants (using e.g. bisulfite sequencing), or other assays well-known to those of skill in the art.

[0320] It is thought that the fusion proteins containing a TET1-polypeptide as described herein and a dCAS9 protein will be able to successfully target a locus of interest and induce DNA de-methylation of the target locus.

### Example 3

### Modified CRISPR-Targeting of TET1 Polypeptide to Specific Loci using MS2 Coat Proteins

[0321] This Example describes exemplary experimental guidelines for constructing recombinant constructs for use in a modified CRISPR-targeting scheme involving TET1 polypeptides as disclosed herein, dCAS9 proteins, and MS2 coat proteins. These constructs may be used to target a TET1 polypeptide to a specific locus of a genome using the CRISPR-CAS9 system.

[0322] Example 2 describes the recombinant fusing of TET1 polypeptides to a dCAS9 protein to target TET1 to a specific locus (e.g. FWA locus). However, it is possible that in some instances, the fusion between the TET1 polypeptide and the dCAS9 protein may impact the function of the TET1 polypeptide, the dCAS9 protein, or both the TET1 polypeptide and the dCAS9 protein. Indeed, it is already known that recombinant fusion of heterologous proteins fused to CAS9 proteins can impact CAS9 function. For example, Morita et al (Nature Biotechnology 34, 1060-1065 (2016)) demonstrated that targeted demethylation using TET1 in animal cells is more efficient using the SunTag system, where TET1 is not fused directly to dCas9, as compared to standard straight fusions of TET1 to dCas9 through a small linker.

[0323] One way to circumvent the potential issues with CAS9 fusion proteins is to use other methods of CRISPR-targeting the TET1 polypeptide to the locus of interest other than by fusing the TET1 polypeptide to the dCAS9 protein. One such method involves adding a small RNA sequence that binds to a specific protein which can then be fused to the TET1 polypeptide. Recently, work by Konermann et al. 2014 showed that two loops in the gRNA backbone (tetraloop and stem 2) can be modified without negative effects on gRNA-CAS9 activity. They added to these loops a hairpin aptamer that selectively binds dimerized MS2 bacteriophage coat proteins and showed that MS2-mediated recruitment of the transcriptional activator VP64 to the gRNA-CAS9 complex was able to induce expression of a target gene.

[0324] A similar technique will be used herein to bypass the possible negative effect that a TET1 polypeptide or the CAS9 protein may have on each other's activity when expressed as a fusion protein in a plant cell. A fusion protein between MS2 and the catalytic domain of TET1 (TET1-CD) will be constructed. The diagram presented in FIG. 6 is a representative scheme of this three component system: (CAS9/gRNA-MS2-aptamer/MS2-TET1-CD).

[0325] A guide RNA designed to target the FWA locus will be fused to the MS2 aptamer to guide the MS2-TET1-CD fusion protein to FWA via the dCAS9 protein.

[0326] Other RNA-binding proteins may also be used in place of MS2, such as PP7 and COM.

[0327] Construction of TET]-CD Fusion Proteins and gRNA-fwa

[0328] Cloning of m4UC_dCas9_MS2_TET1-CD_gRNAMS2. For this purpose, the m4UC_UBQ10_dCas9 vector will be used. This vector contains 2 kb of the 5′ promoter of Arabidopsis UBQ10 gene driving expression of a plant codon-optimized dCas9 that is fused in its C-terminus to 1xHA tag and N7 Nuclear Localization Signals (N7-NLS). A catalytically inactive Cas9, dCas9, will be generated by site directed mutagenesis to change D10A and H840 amino acids. Next, a modified pMDC123 vector (Curtis et al, Plant Phys, 2003) containing 700 bp of the 3′ OCS terminator will be used. 2 kb of UBQ10 promoter, the MS2 binding protein sequence containing 3xGGGS flexible linker, one NLS (Konermann et al Nature. 2014), and 2xFlag sequence will be PCR amplified and cloned in this order by Infusion (Clontech) into the unique Ascl site upstream of the gateway cassette of the modified pMDC123 to create pMDC123 MS2. The fragment of pMDC123 MS2 containing the UBQ10 promoter_MS2_GatewayCassette_OCS terminator will be PCR amplified and inserted by InFusion (Clontech) into the unique Pmel site of m4UC_UBQ10_dCas9 vector to create the m4UC_MS2 vector. A pENTR vector (Invitrogen) containing a cDNA of the TET1 catalytic domain (TET1-CD) will be used to deliver TET1-CD into m4UC_MS2 by LR reaction (Invitrogen) to create the m4UC_MS2_TET1_CD vector. Finally, the Arabidopsis U6 promoter and a gRNA with MS2 loops at tetraloop and stemloop 2 (Konermann et al Nature. 2014) will be PCR amplified and cloned into the unique PmeI site of the m4UC_MS2_TET1_CD vector by Infusion (Clontech). Different 20 nt-long gRNA protospacers against the FWA promoter will be cloned into the gRNA_MS2 cassette by PCR. In order to change the target sequence present in the different gRNAs, the protocol described in Li et al., 2013 using the plasmid pUC-gRNA will be followed.

[0329] The exemplary expression cassette of m4UC_dCas9_MS2_TET1-CD_gRNAMS2 will contain a number of features. The nucleotide sequence of the expression cassette is presented in SEQ ID NO: 54. This cassette is described as a single cassette, but contains a number of different expression regions: (1) one that encodes a gRNA targeting the FWA promoter, (2) one that encodes the dCAS9 coding region, and (3) one that encodes the MS2-TET1-CD fusion protein. The cassette includes a gRNA (SEQ ID NO: 55), a U6 promoter (SEQ ID NO: 56), an OCS terminator (SEQ ID NO: 57), TET1-CD (SEQ ID NO: 58), 2x FLAG (SEQ ID NO: 59), NLS (SEQ ID NO: 60), 3xGGGGS (SEQ ID NO: 61), MS2 (SEQ ID NO: 62), UBQ10 promoter (SEQ ID NO: 63), Insulator (SEQ ID NO: 64), UBQ10 promoter (SEQ ID NO: 65), Omega enhancer (SEQ ID NO: 66), dCAS9 (SEQ ID NO: 67), and an OCS terminator (SEQ ID NO: 68).

[0330] The amino acid sequence of the polypeptide fusion of dCAS9_HA_7N-NLS is presented in SEQ ID NO: 69. The following amino acid sequences are present in this fusion protein: dCAS9 (SEQ ID NO: 70), 1X HA (SEQ ID NO: 71), 7N-NLS (SEQ ID NO: 72).

[0331] The amino acid sequence of the polypeptide fusion of MS2_3xGGGGS_NLS_2xFlag_TET1-CD is presented in SEQ ID NO: 73. The following amino acid sequences are present in this fusion protein: MS2 (SEQ ID NO: 74), 3xGGGGS (SEQ ID NO: 75), NLS (SEQ ID NO: 76), 2xFLAG (SEQ ID NO: 77), TET1-CD (SEQ ID NO: 78).

[0332] To target the FWA locus, various gRNA sequences will be tested, as presented in Table 3A.

[0333] Various gRNA sequences will also be present in a series of tRNA-gRNA expression cassettes. CRISPR-targeting technology involving tRNA-gRNA expression cassettes is described in Xie et al, PNAS (2015). This will allow for the delivery of multiple gRNAs simultaneously with high expression level.

TABLE 3A
gRNA Molecules Targeting the FWA Promoter

| gRNA | crRNA Sequence |
|---|---|
| Name | (5′ → 3′) |
| gRNA3 | ATTCTCGACGGAAAGATGTA (SEQ ID NO: 171) |
| gRNA4 | ACGGAAAGATGTATGGGCTT (SEQ ID NO: 172) |
| gRNA12 | TTCATACGAGCGCCGCTCTA (SEQ ID NO: 173) |
| gRNA14 | CCATTGGTCCAAGTGCTATT (SEQ ID NO: 174) |
| gRNA16 | GCGGCGCAAGATCTGATATT (SEQ ID NO: 175) |
| gRNA17 | AAAACTAGGCCATCCATGGA (SEQ ID NO: 176) |

[0334] An appropriate crRNA sequence will be used in the gRNA structure described above (See SEQ ID NO: 55). FIG. 7 illustrates how various crRNA sequences and the flanking PAM sequence map to the FWA locus.

[0335] For tRNA-gRNA cassettes, one exemplary tRNA-gRNA expression cassette will contain two different gRNA molecules: gRNA4 and gRNA17. This cassette will be called U6p::tRNA-4-17, and the nucleotide sequence of this cassette is presented in SEQ ID NO: 46. Other features of this cassette include a U6 promoter (SEQ ID NO: 47), tRNA (SEQ ID NO: 48), gRNA backbone (SEQ ID NO: 49), and a PolIII terminator sequence (SEQ ID NO: 50).

[0336] Another exemplary tRNA-gRNA expression cassette will contain four different gRNA molecules: gRNA16, gRNA14, gRNA3, and gRNA17. This cassette will be called U6p::tRNA-16-14-3-17, and the nucleotide sequence of this cassette is presented in SEQ ID NO: 51. Other features of this cassette include a U6 promoter (SEQ ID NO: 47), tRNA (SEQ ID NO: 48), gRNA backbone (SEQ ID NO: 49), and a PolIII terminator sequence (SEQ ID NO: 50).

[0337] Transformation of Col-0 Plants

[0338] The construct described above will be transformed into Col-0 wild-type plants using Agrobacterium-mediated genetic transformation (after the construct is transformed into Agrobacterium). This process involves transforming plants via floral dip using methods well-known in the art.

[0339] Flowering Time Measurements

[0340] Progeny of transformed plants (T1s) will be planted and screened for BASTA-resistant plants that incorporate the T-DNA into the Arabidopsis genome, which confers resistance to BASTA. Among the BASTA-resistant transgenic plants, flowering time will be measured and compared to early-flowering wild-type Col-0 and late-flowering fwa-4 plants. Flowering time will be measured by counting the total number of leaves (rossette and cauline) of each individual plant.

[0341] Data Analysis

[0342] Plants transformed with the fusion constructs described above will be evaluated for phenotypic differences as compared to corresponding control plants (e.g. wild-type plants and fwa-4 plants) which are suggestive of successful targeting of the TET1 polypeptide to the locus of interest and subsequent de-methylation and/or transcriptional activation at the locus. The phenotype evaluated may vary depending on the locus targeted. Other analyses to be performed may include measuring the expression level of the targeted locus in the transformed plants, measuring the degree of DNA methylation at the targeted locus in the transformed plants (using e.g. bisulfite sequencing), or other assays well-known to those of skill in the art.

[0343] It is thought that the targeting scheme described in this Example will be able to successfully target a locus of interest and induce DNA de-methylation of the target locus.

### Example 4

### Modified CRISPR-Targeting of TET1 Polypeptide to Specific Loci using SunTag Constructs

[0344] This Example describes exemplary experimental guidelines for constructing recombinant constructs for use in a modified CRISPR-targeting scheme involving TET1 polypeptides as disclosed herein, dCAS9 proteins, and SunTag constructs. These constructs may be used to target a TET1 polypeptide to a specific locus of a genome using the CRISPR-CAS9 system.

[0345] Example 2 describes the recombinant fusing of TET1 polypeptides to a dCAS9 protein to target TET1 to a specific locus (e.g. FWA locus). However, it is possible that in some instances, the fusion between the TET1 polypeptide and the dCAS9 protein may impact the function of the TET1 polypeptide, the dCAS9 protein, or both the TET1 polypeptide and the dCAS9 protein. Indeed, it is already known that recombinant fusion of heterologous proteins fused to CAS9 proteins can impact CAS9 function. For example, Morita et al (Nature Biotechnology 34, 1060-1065 (2016)) demonstrated that targeted demethylation using TET1 in animal cells is more efficient using the SunTag system, where TET1 is not fused directly to dCas9, as compared to standard straight fusions of TET1 to dCas9 through a small linker.

[0346] A technique called SunTag was developed to recruit many effector proteins simultaneously to a location via one dCAS9 protein. In this way, there is an amplification of the effect of targeting, and improved magnitude of gene regulation (Tanenbaum et al, 2014). Tanenbaum et al. described that a dCas9 protein was fused to an unstructured peptide that contains up to 24 copies of the GCN4 epitope. A single chain antibody, scFV, designed to bind this peptide sequence with high affinity and specificity, was fused to an effector protein for gene regulation. Co-expression of the two components allows binding of up to 24 copies of the antibody-fused effector protein to each CAS9-GCN4 fusion protein. In the case of VP64 as an effector protein, this procedure resulted in very high activation of gene expression compared to simple CAS9-VP64 fusion proteins.

[0347] Recently, Morita et al (Nature Biotechnology 34, 1060-1065 (2016)) described a SunTag system that is capable of triggering targeted demethylation when using the TET1 catalytic domain (TET1-CD) in mammalian cells and systems. In this system, dCas9 is fused to an unstructured peptide that contains 5 copies of the GCN4 epitope. A single chain antibody, scFv, designed to bind this peptide sequence with high affinity and specificity, is fused to TET1-CD. Co-expression of the two components allowed binding of up to 5 copies of the antibody-fused effector protein to each Cas9-GCN4 protein. In case of TET1-CD as an effector protein, this procedure resulted in very high demethylation compared to straight fusions of TET1-CD to dCAS9.

[0348] A similar technique will be used herein to allow multiple copies of a TET1 polypeptide to bind a dCAS9-GCN4 fusion protein. The diagram presented in FIG. 8 illustrates an exemplary scheme of this targeting system. A guide RNA designed to target the FWA locus will be co-expressed with the U6 promoter as in the schemes.

[0349] Construction of TET]-CD Fusion Proteins and gRNA-fwa

[0350] Construction of UBQ10_dCAS9_1xHA_2xNLS_5xGCN4_UBQ10_scFV_sfGFP_1xHA_2xNLS_TET1CD. For this purpose, a modified pMTN3164 plasmid and a modified pC1300 plasmid will be created first. dCAS9_1xHA_2xNLS_10xGCN4 will be created through gene synthesis and will be cloned downstream of a fragment containing 1986 bp of the promoter region of Arabidopsis UBQ10 gene followed by an omega RBC translational enhancer creating pMTN3164 UBQ10_dCAS9_1xHA_2xNLS_5xGCN4 and pC1300 UBQ10_dCAS9_1xHA_2xNLS_5xGCN4. A second fragment containing 1986 bp of the promoter region of Arabidopsis UBQ10 gene will be cloned downstream of the 10XGCN4 in the pMTN3164 UBQ10_dCAS9_1xHA_2xNLS_5xGCN4 or pC1300 UBQ10_dCAS9_1xHA_2xNLS_5xGCN4 vectors followed by scFV, sfGFP, 1XHA tag, 2XNLS, and TET1-CD sequence that will be created through gene synthesis creating pMTN3164 UBQ10_dCAS9_1xHA_2xNLS_5xGCN4_UBQ10_scFV_sfGFP_1xHA_2xNLS_TET1CD and pC1300 UBQ10_dCAS9_1xHA_2xNLS_5xGCN4_UBQ10_scFV_sfGFP_1xHA_2xNLS_TET1CD. A gRNA cassette driven by a U6 promoter expressing a single gRNA will be inserted at the PmeI restriction site of pMTN3164 UBQ10_dCAS9_1xHA_2xNLS_5xGCN4_UBQ10_scFV_sfGFP_1xHA_2xNLS_TET1CD or pC1300 UBQ10_dCAS9_1xHA_2xNLS_5xGCN4_UBQ10_scFV_sfGFP_1xHA_2xNLS_TET1CD.

[0351] The exemplary expression cassette of UBQ10_dCAS9_1xHA_2xNLS_5xGCN4_UBQ10_scFV_sfGFP_1xHA_2xNLS_TET1-CD will contain a number of features. The nucleotide sequence of the expression cassette is presented in SEQ ID NO: 79. This cassette is described as a single cassette, but contains a number of different expression regions: (1) one that encodes a gRNA targeting the FWA promoter, (2) one that encodes the dCAS9-5xGCN4 fusion protein, and (3) one that encodes the scFv-TET1-CD fusion protein. The cassette includes U6::gRNA (SEQ ID NO: 80), a UBQ10 promoter (SEQ ID NO: 81), Omega RBC (SEQ ID NO: 82), dCAS9 (SEQ ID NO: 83), 1xHA (SEQ ID NO: 84), 2xNLS (SEQ ID NO: 85), linker (SEQ ID NO: 86), 5xGCN4 (SEQ ID NO: 87), OCS terminator (SEQ ID NO: 88), insulator (SEQ ID NO: 89), scFv (SEQ ID NO: 90), sfGFP (SEQ ID NO: 91), TET1-CD (SEQ ID NO: 92), and NOS terminator (SEQ ID NO: 93).

[0352] The amino acid sequence of the polypeptide fusion of dCAS9_1 xHA_2xNLS_5xGCN4 is presented in SEQ ID NO: 94. Relevant amino acid sequences present in this fusion protein include, for example: dCAS9 (SEQ ID NO: 95), 1X HA (SEQ ID NO: 96), 2xNLS (SEQ ID NO: 97), linker (SEQ ID NO: 98), and 5xGCN4 (SEQ ID NO: 99).

[0353] The amino acid sequence of the polypeptide fusion of scFV_sfGFP_1xHA_2xNLS_TET1CD is presented in SEQ ID NO: 100. Relevant amino acid sequences present in this fusion protein include, for example: scFv (SEQ ID NO: 101), sfGFP (SEQ ID NO: 102), and TET1-CD (SEQ ID NO: 103).

[0354] A similar construct to the one above will also be constructed, but will contain 10xGCN4 (SEQ ID NO: 104), instead of 5xGCN4.

[0355] To target the FWA locus, various gRNA sequences will be tested, as presented in Table 4A.

[0356] Various gRNA sequences will also be present in a series of tRNA-gRNA expression cassettes. CRISPR-targeting technology involving tRNA-gRNA expression cassettes is described in Xie et al, PNAS (2015). This will allow for the delivery of multiple gRNAs simultaneously with high expression level.

TABLE 4A
gRNA Molecules Targeting the FWA Promoter

| gRNA | crRNA Sequence |
|---|---|
| Name | (5′ → 3′) |
| gRNA3 | ATTCTCGACGGAAAGATGTA (SEQ ID NO: 171) |
| gRNA4 | ACGGAAAGATGTATGGGCTT (SEQ ID NO: 172) |
| gRNA12 | TTCATACGAGCGCCGCTCTA (SEQ ID NO: 173) |
| gRNA14 | CCATTGGTCCAAGTGCTATT (SEQ ID NO: 174) |
| gRNA16 | GCGGCGCAAGATCTGATATT (SEQ ID NO: 175) |
| gRNA17 | AAAACTAGGCCATCCATGGA (SEQ ID NO: 176) |

[0357] An appropriate crRNA sequence will be used in the gRNA structure described above (See SEQ ID NO: 80). FIG. 7 illustrates how various crRNA sequences and the flanking PAM sequence map to the FWA locus.

[0358] For tRNA-gRNA cassettes, one exemplary tRNA-gRNA expression cassette will contain two different gRNA molecules: gRNA4 and gRNA17. This cassette will be called U6p::tRNA-4-17, and the nucleotide sequence of this cassette is presented in SEQ ID NO: 46. Other features of this cassette include a U6 promoter (SEQ ID NO: 47), tRNA (SEQ ID NO: 48), gRNA backbone (SEQ ID NO: 49), and a PolIII terminator sequence (SEQ ID NO: 50).

[0359] Another exemplary tRNA-gRNA expression cassette will contain four different gRNA molecules: gRNA16, gRNA14, gRNA3, and gRNA17. This cassette will be called U6p::tRNA-16-14-3-17, and the nucleotide sequence of this cassette is presented in SEQ ID NO: 51. Other features of this cassette include a U6 promoter (SEQ ID NO: 47), tRNA (SEQ ID NO: 48), gRNA backbone (SEQ ID NO: 49), and a PolIII terminator sequence (SEQ ID NO: 50).

[0360] Transformation of Col-0 Plants

[0361] The construct described above will be transformed into Col-0 wild-type plants using Agrobacterium-mediated genetic transformation (after the construct is transformed into Agrobacterium). This process involves transforming plants via floral dip using methods well-known in the art.

[0362] Flowering Time Measurements

[0363] Progeny of transformed plants (T1s) will be planted and screened for BASTA-resistant plants that incorporate the T-DNA into the Arabidopsis genome, which confers resistance to BASTA. Among the BASTA-resistant transgenic plants, flowering time will be measured and compared to early-flowering wild-type Col-0 and late-flowering fwa-4 plants. Flowering time will be measured by counting the total number of leaves (rossette and cauline) of each individual plant.

[0364] Data Analysis

[0365] Plants transformed with the fusion constructs described above will be evaluated for phenotypic differences as compared to corresponding control plants (e.g. wild-type plants and fwa-4 plants) which are suggestive of successful targeting of the TET1 polypeptide to the locus of interest and subsequent de-methylation and/or transcriptional activation at the locus. The phenotype evaluated may vary depending on the locus targeted. Other analyses to be performed may include measuring the expression level of the targeted locus in the transformed plants, measuring the degree of DNA methylation at the targeted locus in the transformed plants (using e.g. bisulfite sequencing), or other assays well-known to those of skill in the art.

[0366] It is thought that the targeting scheme described in this Example will be able to successfully target a locus of interest and induce DNA de-methylation of the target locus.

### Example 5

### SunTag-Based Targeting of TET1 to FWA Locus

[0367] In the present Example, Applicant used the SunTag targeting scheme to target a TET1 polypeptide to the FWA locus in Arabidopsis using the CRISPR-CAS9 system.

[0368] Example 4 describes an exemplary SunTag-based targeting scheme to target a TET1 polypeptide to a target nucleic acid. This Example describes a successful SunTag targeting scheme in which a TET1 polypeptide was targeted to the FWA locus in Arabidopsis using the CRISPR-CAS9 system. A schematic of the targeting system is presented in FIG. 9.

### Materials and Methods

[0369] Construction of:

[0370] gRNA4_U6_NOS_TET1CD_2xNLS_1xHA_sfGFP_scFv_UBQ10_INSULATOR_UBQ10_dCAS9_1xHA_3xNLS_10xGCN422aa_OCS and gRNA4_U6_NOS_TET1CD_2xNLS_1xHA_sfGFP_scFv_UBQ10_INSULATOR_UBQ10_dCAS9_1xHA_3xNLS_10xGCN414aa_OCS

[0371] For this purpose, a dCAS9_1xHA_3xNLS_10xGCN4 that contains a 22aa spacer between epitopes (dCAS9_1xHA_3xNLS_10xGCN422aa) and a dCAS9_1xHA_3xNLS_10xGCN4 that contains a 14aa spacer between epitopes (dCAS9_1xHA_3xNLS_10xGCN414aa) were created through a combination of gene synthesis and the utilization of plasmids from Addgene, and separately cloned into a modified pMTN3164 plasmid downstream of a fragment containing 1986bp of the promoter region of Arabidopsis UBQ10 gene followed by an omega RBC translational enhancer and upstream of a OCS terminator creating pMTN3164 UBQ10_dCAS9_1xHA_3xNLS_10xGCN422aa_OCS and pMTN3164 UBQ10_dCAS9_1xHA_3xNLS_10XGCN414aa_OCS. An insulator sequence followed by a second fragment containing 1986bp of the promoter region of Arabidopsis UBQ10 gene was then cloned upstream of UBQ10_dCAS9_1xHA_3xNLS_10xGCN422aa_OCS and pMTN3164 UBQ10_dCAS9_1xHA_3xNLS_10XGCN414aa_OCS such that transcription of downstream targets resulting from this second UBQ promoter would occur opposite the dCAS9_1xHA_3xNLS_10xGCN422aa or dCAS9_1xHA_3xNLS_10xGCN414aa transcription. A NOS terminator was then cloned downstream of this second UBQ10 promoter in both the UBQ10_INSULATOR_UBQ10_dCAS9_1xHA_3xNLS_10xGCN422aa_OCS and UBQ10_INSULATOR_UBQ10_dCAS9_1xHA_3xNLS_10xGCN414aa_OCS constructs creating pMTN3164 NOS_UBQ10_INSULATOR_UBQ10_dCAS9_1xHA_3xNLS_10xGCN422aa_OCS and pMTN3164 NOS_UBQ10_INSULATOR_UBQ10 dCAS9_1xHA_3xNLS_10xGCN414aa_OCS. A scFv_sfGFP_1XHA_2XNLS_TET1CD sequence created through a combination of gene synthesis and the utilization of plasmids from Addgene was then cloned downstream of the second UBQ10 promoter and upstream of the NOS terminator in both vectors creating pMTN3164 NOS_TET1CD_2xNLS_1 xHA_sfGFP_scFv_UBQ10_INSULATOR_UBQ10 dCAS9_1xHA_3xNLS_10xGCN422aa_OCS and pMTN3164 NOS_TET1CD_2xNLS_1xHA_sfGFP_scFv_UBQ10_INSULATOR_UBQ10 dCAS9_1xHA_3xNLS_10xGCN414aa_OCS. For both vectors a gRNA4 cassette driven by a U6 promoter expressing a single gRNA4 was inserted at the PmeI restriction site of pMTN3164 downstream of the NOS terminator creating gRNA4_U6_NOS_TET1CD_2xNLS_1 xHA_sfGFP_scFv_UBQ10_INSULATOR_UBQ10_dCAS9_1xHA_3xNLS_10xGCN422aa_OCS and gRNA4_U6_NOS_TET1CD_2xNLS_1xHA_sfGFP_scFv_UBQ10_INSULATOR_UBQ10_dCAS9_1xHA_3xNLS_10xGCN414aa_OCS.

[0372] The expression cassette of gRNA4_U6_NOS_TET1CD_2xNLS_1xHA_sfGFP_scFv_UBQ10_INSULATOR_UBQ10_dCAS9_1xHA_3xNLS_10xGCN422aa_OCS and gRNA4_U6_NOS_TET1CD_2xNLS_1xHA_sfGFP_scFv_UBQ10_INSULATOR_UBQ10_dCAS9_1xHA_3xNLS_10xGCN414aa_OCS differ only in the 10xGCN4 sequence. These vectors contain a number of features. The nucleotide sequence gRNA4_U6_NOS_TET1CD_2xNLS_1xHA_sfGFP_scFv_UBQ10_INSULATOR_UBQ10_dCAS9_1xHA_3xNLS_10xGCN422aa_OCS and gRNA4_U6_NOS_TET1CD_2xNLS_1xHA_sfGFP_scFv_UBQ10_INSULATOR_UBQ10_dCAS9_1xHA_3xNLS_10xGCN414aa_OCS expression cassettes are presented in SEQ ID NO: 105 and SEQ ID NO: 106, respectively. These cassettes are described as single cassettes, but contain many different expression regions: (1) one that encodes gRNA4 (See Example 4) targeting the FWA promoter, (2) one that encodes the dCAS9-10xGCN4 fusion protein, and (3) one that encodes the scFv-sfGFP-TET1-CD fusion protein. The cassette includes U6::gRNA4 (SEQ ID NO: 107), a UBQ10 promoter (SEQ ID NO: 108), Omega RBC (SEQ ID NO: 109), dCAS9 (SEQ ID NO: 110), 1xHA (SEQ ID NO: 111), 3xNLS (SEQ ID NO: 112), 2xNLS (SEQ ID NO: 113), linker (SEQ ID NO: 114), 10xGCN422aa (SEQ ID NO: 115) or 10xGCN414aa (SEQ ID NO: 116), OCS terminator (SEQ ID NO: 117), insulator (SEQ ID NO: 118), scFv (SEQ ID NO: 119), sfGFP (SEQ ID NO: 120), TET1-CD (SEQ ID NO: 121), and NOS terminator (SEQ ID NO: 122).

[0373] The amino acid sequence of the polypeptide fusion of dCAS9_1xHA_3xNLS_10xGCN422aa is presented in SEQ ID NO: 123 and amino acid sequence of the polypeptide fusion of dCAS9_1xHA_3xNLS_10xGCN414aa is presented in SEQ ID NO: 124. Relevant amino acid sequences present in these fusion proteins include, for example: dCAS9 (SEQ ID NO: 125), 1X HA (SEQ ID NO: 126), 3xNLS (SEQ ID NO: 127), linker (SEQ ID NO: 128), and 10xGCN422aa (SEQ ID NO: 129) or 10xGCN414aa (SEQ ID NO: 130).

[0374] The amino acid sequence of the polypeptide fusion of scFv_sfGFP_1xHA_2xNLS_TET1CD is presented in SEQ ID NO: 131 and is identical in both gRNA4_U6_NOS_TET1CD_2xNLS_1xHA_sfGFP_scFv_UBQ10_INSULATOR_UBQ10_dCAS9_1xHA_3xNLS_10xGCN422aa_OCS and gRNA4_U6_NOS_TET1CD_2xNLS_1xHA_sfGFP_scFv_UBQ10_INSULATOR_UBQ10_dCAS9_1xHA_3xNLS_10xGCN414aa_OCS vectors. Relevant amino acid sequences present in this fusion protein include, for example: scFv (SEQ ID NO: 132), sfGFP (SEQ ID NO: 133), 1xHA (SEQ ID NO: 134), 2xNLS (SEQ ID NO: 135), Linker (SEQ ID NO: 136), and TET1-CD (SEQ ID NO: 137).

[0375] Plant Transformation and Flowering Time Measurement

[0376] The constructs described above were transformed into Col-0 wild-type plants using Agrobacterium-mediated genetic transformation (after the construct was transformed into Agrobacterium). This process involves transforming plants via floral dip using methods well known in the art. Progeny of transformed plants (Tls) were screened for Hygromycin resistance. Among the Hygromycin-resistant transgenic plants, flowering time was measured and compared to early-flowering wild-type Col-0 and late-flowering fwa-4 plants. Flowering time was measured by counting the total number of leaves (rosette and cauline) of each individual plant.

[0377] Bisulfite Sequencing and Data Analysis

[0378] Whole genome bisulfite sequencing (BS-Seq) libraries were generated as previously reported (Cokus et al., 2008) and all libraries were sequenced using the HiSeq 2000 platform following manufacturer instructions (Illumina) at a length of 50 bp. BS-Seq reads were aligned to the TAIR10 version of the Arabidopsis thaliana reference genome using BS-map-2.74. For BS-Seq, up to 2 mismatches were allowed and only uniquely mapped reads were used.

[0379] RNA-Seq

[0380] Raw reads in qseq format obtained from the sequencer were first converted to fastq format with a customized perl script. Read quality was controlled with FastQC (http://vvwvv.bioinformatics.babraham.ac.uk/projects/fastqc). High quality reads were then aligned to Tair10 reference genome using Tophat (Trapnell et al, 2009) (v 2.0.13) by using ‘-no-coverage-search’ option, allowing up to two mismatches and only keeping reads that mapped to one location. Essentially, reads were first mapped to TAIR10 gene annotation with known splice junction. When reads did not map to the annotated genes, the reads were mapped to Tair10 genome. The number of reads mapping to genes were calculated by HTseq (Anders et al., 2015) (v 0.5.4) with default parameters. Expression levels were determined by RPKM (reads per kilobase of exons per million aligned reads) in R using customized scripts.

### Results

[0381] To explore whether gRNA4_U6_NOS_TET1CD_2xNLS_1xHA_sfGFP_scFv_UBQ10_INSULATOR_UBQ10_dCAS9_1xHA_3xNLS_10xGCN422aa_OCS or gRNA4_U6_NOS_TET1CD_2xNLS_1xHA_sfGFP_scFv_UBQ10_INSULATOR_UBQ10_dCAS9_1xHA_3xNLS_10xGCN414aa_OCS can trigger demethylation and reactivate FWA expression, wild-type Col-0 plants were transformed with the gRNA4_U6_NOS_TET1CD_2xNLS_1xHA_sfGFP_scFv_UBQ10_INSULATOR_UBQ10_dCAS9_1xHA_3xNLS_10xGCN422aa_OCS or gRNA4_U6_NOS_TET1CD_2xNLS_1xHA_sfGFP_scFv_UBQ10_INSULATOR_UBQ10_dCAS9_1xHA_3xNLS_10xGCN414aa_OCS construct described above. Flowering time of T1 transgenic plants was assayed, and results are presented below in Table 5A.

TABLE 5A
Flowering Time Results

| | Early | Late |
|---|---|---|
| Line | Flowering | Flowering |
| gRNA4_U6_TET1CD_2xNLS_1xHA_{—} | 7 | 2 |
| sfGFP_scFv_UBQ10_INSULATOR_{—} | | |
| UBQ10_dCAS9_1xHA_3xNLS_{—} | | |
| 10xGCN422aa | | |
| gRNA4_U6_NOS_TET1CD_2xNLS_{—} | 1 | 2 |
| 1xHA_sfGFP_scFv_UBQ10_{—} | | |
| INSULATOR_UBQ10_dCAS9_1xHA_{—} | | |
| 3xNLS_10xGCN414aa_OCS | | |

[0382] The results presented in Table 5A demonstrate that targeting the TETI catalytic domain (TET1-CD) to the FWA locus using the SunTag system can efficiently promote late flowering in wild-type plants.

[0383] To test if the late flowering phenotype of plants containing the gRNA4_U6_NOS_TET1CD_2xNLS_1xHA_sfGFP_scFv_UBQ10_INSULATOR_UBQ10_dCAS9_1xHA_3xNLS_10xGCN422aa_OCS or gRNA4_U6_NOS_TET1CD_2xNLS_1xHA_sfGFP_scFv_UBQ10_INSULATOR_UBQ10_dCAS9_1xHA_3xNLS_10xGCN414aa_OCS construct describe in Table 5A is due to the loss of methylation in the FWA promoter, whole-genome BS-Seq experiments were conducted as described above. The results, presented in FIG. 10 and FIG. 11 for plants containing the gRNA4_U6_NOS_TET1CD_2xNLS_1xHA_sfGFP_scFv_UBQ10_INSULATOR_UBQ10_dCAS9_1xHA_3xNLS_10xGCN422aa_OCS construct and FIG. 12 and FIG. 13 for plants containing the gRNA4_U6_NOS_TET1CD_2xNLS_1 xHA_sfGFP_scFv_UBQ10_INSULATOR_UBQ10_dCAS9_1xHA_3xNLS_10xGCN414aa_OCS construct, show a loss of methylation in the FWA promoter in backgrounds that contain the gRNA4_U6_NOS_TET1CD_2xNLS_1xHA_sfGFP_scFv_UBQ10_INSULATOR_UBQ10_dCAS9_1xHA_3xNLS_10xGCN422aa_OCS or gRNA4_U6_NOS_TET1CD_2xNLS_1xHA_sfGFP_scFv_UBQ10_INSULATOR_UBQ10_dCAS9_1xHA_3xNLS_10xGCN414aa_OCS constructs and that this demethylation was specific to the FWA promoter (FIG. 11 and FIG. 13).

[0384] To test if the late flowering observed in gRNA4_U6_NOS_TET1CD_2xNLS_1 xHA_sfGFP_scFv_UBQ10_INSULATOR_UBQ10_dCAS9_1xHA_3xNLS_10xGCN422aa_OCS or gRNA4_U6_NOS_TET1CD_2xNLS_1 xHA_sfGFP_scFv_UBQ10_INSULATOR_UBQ10_dCAS9_1xHA_3xNLS_10xGCN414aa_OCS lines were due to the activation of FWA expression, RNA-seq was performed with one independent T1 line for gRNA4_U6_NOS_TET1CD_2xNLS_1xHA_sfGFP_scFv_UBQ10_INSULATOR_UBQ10_dCAS9_1xHA_3xNLS_10xGCN422aa_OCS and two independent T1 lines for gRNA4_U6_NOS_TET1CD_2xNLS_1xHA_sfGFP_scFv_UBQ10_INSULATOR_UBQ10_dCAS9_1xHA_3xNLS_10xGCN414aa_OCS. The results presented in FIG. 14 show that FWA was upregulated in all transgenic lines tested compared to expression in Col-0 wild type plants while two control housekeeping genes remained unaffected.

[0385] The results presented in this Example demonstrate that the specific targeting of the TET1 catalytic domain to a genomic region of interest can be used to target demethylation and gene activation in plants in a very specific manner.

### Example 6

### SunTag-Based Targeting of TET1 to the CACTA1 Locus

[0386] In the present Example, Applicant used the SunTag targeting scheme to target a TET1 polypeptide to the CACTA1 locus in Arabidopsis using the CRISPR-CAS9 SunTag system.

[0387] Example 4 describes an exemplary SunTag-based targeting scheme to target a TET1 catalytic polypeptide to a target nucleic acid. This Example describes a successful SunTag targeting scheme in which a TET1 polypeptide was targeted to the CACTA1 locus in Arabidopsis using the CRISPR-CAS9 system. A schematic of the targeting system is presented in FIG. 15.

[0388] Materials and Methods

[0389] Construction of:
[0390] CACTA1gRNA2_U6_NOS_TET1CD_2xNLS_1 xHA_sfGFP_scFv_UBQ10 INSULATOR_UBQ10_dCAS9_1xHA_3xNLS_10xGCN422aa_OCS

[0391] For this purpose, a dCAS9_1xHA_3xNLS_10xGCN4 that contains a 22aa spacer between epitopes (dCAS9_1xHA_3xNLS_10xGCN422aa) was created through a combination of gene synthesis and the utilization of plasmids from Addgene and separately cloned into a modified pMTN3164 (also called pMOA) plasmid downstream of a fragment containing 1994 bp of the promoter region of the Arabidopsis UBQ10 gene followed by an omega RBC translational enhancer and upstream of an OCS terminator creating pMTN3164 UBQ10_dCAS9_1xHA_3xNLS_10xGCN422aa_OCS. An insulator sequence followed by a second fragment containing 1986 bp of the promoter region of the Arabidopsis UBQ10 gene was then cloned upstream of UBQ10_dCAS9_1xHA_3xNLS_10xGCN422aa_OCS such that transcription of downstream targets resulting from this second UBQ10 promoter would occur opposite the dCAS9_1xHA_3xNLS_10xGCN422aa transcription. Sequences created through a combination of gene synthesis and the utilization of plasmids from Addgene were then cloned downstream of the second UBQ10 promoter creating pMTN3164 TET1CD_2xNLS_1 xHA_sfGFP_scFv_UBQ10_INSULATOR_UBQ10 dCAS9_1xHA_3xNLS_10xGCN422aa_OCS. A NOS terminator was then cloned downstream of TET1cd in the TET1CD_2xNLS_1 xHA_sfGFP_scFv_UBQ10_INSULATOR_UBQ10_dCAS9_1xHA_3xNLS_10xGCN422aa_OCS construct creating pMTN3164 NOS_TET1CD_2xNLS_1xHA_sfGFP_scFv_UBQ10_INSULATOR_UBQ10_dCAS9_1xHA_3xNLS_10xGCN422aa_OCS. A CACTA1gRNA2 cassette driven by a U6 promoter expressing a single CACTA1gRNA2 was inserted at the Pmel restriction site of pMTN3164 downstream of the NOS terminator creating CACTA1gRNA2_U6_NOS_TET1CD_2xNLS_1xHA_sfGFP_scFv_UBQ10_INSULATOR_UBQ10 dCAS9_1xHA_3xNLS_10xGCN422aa_OCS.

[0392] The expression cassette of CACTA1gRNA2_U6_NOS_TET1CD_2xNLS_1 xHA_sfGFP_scFv_UBQ10_INSULATOR_UBQ10_dCAS9_1xHA_3xNLS_10xGCN422aa_OCS contains a number of features. The nucleotide sequence of the CACTA1gRNA2_U6_NOS_TET1CD_2xNLS_1xHA_sfGFP_scFv_UBQ10_INSULATOR_UBQ10_dCAS9_1xHA_3xNLS_10xGCN422aa_OCS expression cassette is presented in SEQ ID NO: 142. This cassette is described as a single cassette, but contains many different expression regions: (1) one that encodes CACTA1gRNA2 targeting the CACTA1 promoter, (2) one that encodes the dCAS9-10xGCN4 fusion protein, and (3) one that encodes the scFv-sfGFP-TET1-CD fusion protein. The cassette includes U6::CACTA1gRNA2 (SEQ ID NO: 143), a UBQ10 promoter (SEQ ID NO: 108), Omega RBC (SEQ ID NO: 109), dCAS9 (SEQ ID NO: 110), 1xHA (SEQ ID NO: 111), 3xNLS (SEQ ID NO: 112), 2xNLS (SEQ ID NO: 113), linkers (SEQ ID NO: 114), 10xGCN422aa (SEQ ID NO: 115), OCS terminator (SEQ ID NO: 117), insulator (SEQ ID NO: 118), scFv (SEQ ID NO: 119), sfGFP (SEQ ID NO: 120), TET1-CD (SEQ ID NO: 121), and NOS terminator (SEQ ID NO: 122).

[0393] The amino acid sequence of the polypeptide fusion of dCAS9_1xHA_3xNLS_10xGCN422aa is presented in SEQ ID NO: 123. Relevant amino acid sequences present in these fusion proteins include, for example: dCAS9 (SEQ ID NO: 125), 1X HA (SEQ ID NO: 126), 3xNLS (SEQ ID NO: 127), linker (SEQ ID NO: 128), and 10xGCN422aa (SEQ ID NO: 129).

[0394] The amino acid sequence of the polypeptide fusion of scFv_sfGFP_1xHA_2xNLS_TET1CD is presented in SEQ ID NO: 131. Relevant amino acid sequences present in this fusion protein include, for example: scFv (SEQ ID NO: 132), sfGFP (SEQ ID NO: 133), 1xHA (SEQ ID NO: 134), 2xNLS (SEQ ID NO: 135), Linkers (SEQ ID NO: 136), and TET1-CD (SEQ ID NO: 137).

[0395] Plant Transformation

[0396] The constructs described above were transformed into Col-0 wild-type plants using Agrobacterium-mediated genetic transformation (after the construct was transformed into Agrobacterium). This process involves transforming plants via floral dip using methods well known in the art. Progeny of transformed plants (Tls) were screened for Hygromycin resistance.

[0397] Bisulfite Sequencing and Data Analysis

[0398] Whole genome bisulfite sequencing (BS-Seq) libraries were generated as previously reported (Cokus et al., 2008) and all libraries were sequenced using the HiSeq 4000 platform following manufacturer instructions (Illumina) at a length of 50 bp. BS-Seq reads were aligned to the TAIR10 version of the Arabidopsis thaliana reference genome using BS-map-2.74. For BS-Seq, up to 2 mismatches were allowed and only uniquely mapped reads were used.

[0399] Metaplot of WGBS Data

[0400] Metaplots of WGBS data were made using custom Perl and R scripts. Regions of interest were broken into 50 bins while flanking 1 kb regions were each broken into 25 bins. CG, CHG and CHH methylation levels in each bin were then determined. Metaplots were then generated with R.

[0401] Quantitative Real-Time PCR

[0402] Among the Hygromycin-resistant transgenic plants, CACTA1 gene expression was measured and compared to CACTA1 gene expression in wild-type Col-0. Gene expression was measured by performing quantitative Real-time PCR (qPCR) of each individual plant. qPCR was done using the oligos (5′-agtgtttcaatcaaggcgtttc-3′) (SEQ ID NO: 177) and (5′-cacccaatggaacaaagtgaac-3′) (SEQ ID NO: 178) to amplify a region of the CACTA1 gene. As an internal control, CACTA1 expression values were normalized to the expression of the IPP2 housekeeping gene collected from the same sample using oligos (5′-gtatgagttgcttctccagcaaag-3′) (SEQ ID NO: 179) and (5′-gaggatggctgcaacaagtgt-3′) (SEQ ID NO: 180).

### Results

[0403] To explore if CACTA1gRNA2_U6_NOS_TET1CD_2xNLS_1xHA_sfGFP_scFv_UBQ10_INSULATOR_UBQ10_dCAS9_1xHA_3xNLS_10xGCN422aa_OCS can trigger demethylation and reactivate CACTA1 expression, wild-type Col-0 plants were transformed with the CACTA1gRNA2_U6_NOS_TET1CD_2xNLS_1xHA_sfGFP_scFv_UBQ10_INSULATOR_UBQ10_dCAS9_1xHA_3xNLS_10xGCN422aa_OCS construct described above. CACTA1 expression was assayed using qPCR. The results presented in FIG. 16 demonstrate that targeting the TET1 catalytic domain (TET1-CD) to the CACTA1 locus using the SunTag system can efficiently reactivate CACTA1 expression.

[0404] To test if reactivation of CACTA1 expression in plants containing the CACTA1gRNA2_U6_NOS_TET1CD_2xNLS_1xHA_sfGFP_scFv_UBQ10_INSULATOR_UBQ10_dCAS9_1xHA_3xNLS_10xGCN422aa_OCS transgene described in FIG. 16 is due to the loss of methylation in the CACTA1 promoter, BS-Seq experiments were conducted as described above. The results, presented in FIG. 17 and FIG. 18, show a loss of methylation in the CACTA1 promoter in backgrounds that contains the CACTA1gRNA2_U6_NOS_TET1CD_2xNLS_1xHA_sfGFP_scFv_UBQ10_INSULATOR_UBQ10_dCAS9_1xHA_3xNLS_10xGCN422aa_OCS transgene, and show that this demethylation was specific to the CACTA1 promoter (FIG. 17 and FIG. 18), as regions flanking CACTA1 were mostly unaffected.

[0405] To test the specificity of the targeted demethylation caused by the expression of the CACTA1gRNA2_U6_NOS_TET1CD_2xNLS_1xHA_sfGFP_scFv_UBQ10_INSULATOR_UBQ10_dCAS9_1xHA_3xNLS_10xGCN422aa_OCS transgene in T1 plants, genome-wide methylation levels were checked and compared with that of a Col-0 control plant. The results presented in FIG. 19 show that genome-wide DNA methylation levels were similar among all backgrounds examined, indicating that the TETI fusion was specifically acting at its target.

[0406] The results presented in this Example demonstrate that the specific targeting of the TET1 catalytic domain to a genomic region of interest by the SunTag targeting scheme can be used to target demethylation and gene activation in plants in a very specific manner. This system can thus be used to study the role of DNA methylation at specific loci without the need for mutants or chemicals that impair genome-wide methylation levels. The successful demethylation of the promoter region of CACTA1 indicates that other TEs may also be amenable to targeted demethylation, which enables the exploration of the effects of TE activity upon genome integrity, as well as the reactivation of TEs for mutagenesis.

### Example 7

### SunTag-Based Targeting of TET1 to the ROS1 Locus

[0407] In the present Example, Applicant used the SunTag targeting scheme to target a TET1 polypeptide to the ROS1 locus in Arabidopsis using the CRISPR-CAS9 system.

[0408] Example 4 describes an exemplary SunTag-based targeting scheme to target a TET1 polypeptide to a target nucleic acid. This Example describes a successful SunTag targeting scheme in which a TET1 polypeptide was targeted to the ROS1 locus in Arabidopsis using the CRISPR-CAS9 system. A schematic of the targeting system is presented in FIG. 20.

[0409] Materials and Methods

[0410] Construction of:
[0411] ROS1gRNA2_U6_NOS_TET1CD_2xNLS_1xHA_sfGFP_scFv_UBQ10_INSULATOR_UBQ10_dCAS9_1xHA_3xNLS_10xGCN422aa_OCS

[0412] For this purpose, a dCAS9_1xHA_3xNLS_10xGCN4 that contains a 22aa spacer between epitopes (dCAS9_1xHA_3xNLS_10xGCN422aa) was created through a combination of gene synthesis and the utilization of plasmids from Addgene and separately cloned into a modified pMTN3164 plasmid downstream of a fragment containing 1994 bp of the promoter region of the Arabidopsis UBQ10 gene followed by an omega RBC translational enhancer and upstream of an OCS terminator creating pMTN3164 UBQ10_dCAS9_1xHA_3xNLS_10xGCN422aa_OCS. An insulator sequence followed by a second fragment containing 1994 bp of the promoter region of the Arabidopsis UBQ10 gene was then cloned upstream of UBQ10_dCAS9_1xHA_3xNLS_10xGCN422aa_OCS such that transcription of downstream targets resulting from this second UBQ10 promoter would occur opposite the dCAS9_1xHA_3xNLS_10xGCN422aa transcription. A scFv_sfGFP_1XHA_2XNLS_TET1CD sequence created through a combination of gene synthesis and the utilization of plasmids from Addgene was then cloned downstream of the second UBQ10 promoter creating pMTN3164 TET1CD_2xNLS_1xHA_sfGFP_scFv_UBQ10_INSULATOR_UBQ10_dCAS9_1xHA_3xNLS_10xGCN422aa_OCS. A NOS terminator was then cloned downstream of TET1cd in the TET1CD_2xNLS_1xHA_sfGFP_scFv_UBQ10_INSULATOR_UBQ10_dCAS9_1xHA_3xNLS_10xGCN422aa_OCS construct creating pMTN3164 NOS_TET1CD_2xNLS_1xHA_sfGFP_scFv_UBQ10_INSULATOR_UBQ10_dCAS9_1xHA_3xNLS_10xGCN422aa_OCS. A ROS1gRNA2 cassette driven by a U6 promoter expressing a single ROS1gRNA2 was inserted at the PmeI restriction site of pMTN3164 downstream of the NOS terminator creating ROS1gRNA2_U6_NOS_TET1CD_2xNLS_1xHA_sfGFP_scFv_UBQ10_INSULATOR_UBQ10_dCAS9_1xHA_3xNLS_10xGCN422aa_OCS.

[0413] The ROS1gRNA2_U6_NOS_TET1CD_2xNLS_1xHA_sfGFP_scFv_UBQ10_INSULATOR_UBQ10_dCAS9_1xHA_3xNLS_10xGCN422aa_OCS vector contains a number of features. The nucleotide sequence of of the ROS1gRNA2_U6_NOS_TET1CD_2xNLS_1xHA_sfGFP_scFv_UBQ10_INSULATOR_UBQ10_dCAS9_1xHA_3xNLS_10xGCN422aa_OCS expression cassette is presented in SEQ ID NO: 144. This cassette is described as a single cassette, but contains many different expression regions: (1) one that encodes ROS1gRNA2 targeting the ROS1 promoter, (2) one that encodes the dCAS9-10xGCN4 fusion protein, and (3) one that encodes the scFv-sfGFP-TET1-CD fusion protein. The cassette includes U6::ROS1gRNA2 (SEQ ID NO: 145), a UBQ10 promoter (SEQ ID NO: 108), Omega RBC (SEQ ID NO: 109), dCAS9 (SEQ ID NO: 110), lxHA (SEQ ID NO: 111), 3xNLS (SEQ ID NO: 112), 2xNLS (SEQ ID NO: 113), linkers (SEQ ID NO: 114), 10xGCN422aa (SEQ ID NO: 115), OCS terminator (SEQ ID NO: 117), insulator (SEQ ID NO: 118), scFv (SEQ ID NO: 119), sfGFP (SEQ ID NO: 120), TET1-CD (SEQ ID NO: 121), and NOS terminator (SEQ ID NO: 122).

[0414] The amino acid sequence of the polypeptide fusion of dCAS9_1xHA_3xNLS_10xGCN422aa is presented in SEQ ID NO: 123. Relevant amino acid sequences present in these fusion proteins include, for example: dCAS9 (SEQ ID NO: 125), 1X HA (SEQ ID NO: 126), 3xNLS (SEQ ID NO: 127), linker (SEQ ID NO: 128), and 10xGCN422aa (SEQ ID NO: 129).

[0415] The amino acid sequence of the polypeptide fusion of scFv_sfGFP_1xHA_2xNLS_TET1CD is presented in SEQ ID NO: 131. Relevant amino acid sequences present in this fusion protein include, for example: scFv (SEQ ID NO: 132), sfGFP (SEQ ID NO: 133), 1xHA (SEQ ID NO: 134), 2xNLS (SEQ ID NO: 135), Linkers (SEQ ID NO: 136), and TET1-CD (SEQ ID NO: 137).

[0416] Plant Transformation

[0417] The construct described above was transformed into Col-0 wild-type plants using Agrobacterium-mediated genetic transformation (after the construct was transformed into Agrobacterium). This process involves transforming plants via floral dip using methods well known in the art. Progeny of transformed plants (T1s) were screened for Hygromycin resistance.

[0418] Quantitative Real-Time PCR

[0419] Among the Hygromycin-resistant transgenic plants, ROS1 gene expression was measured and compared to ROS1 gene expression in wild-type Col-0. Gene expression was measured by performing Quantitative Real-time PCR (qPCR) of each individual plant. qPCR was done using the oligos (5′-caggcttgcttttggaaagggtacg-3′) (SEQ ID NO: 181) and (5′-gtgctctctcactcttaaccataagct-3′) (SEQ ID NO: 182) to amplify a region of the ROS1 gene. As an internal control ROS1 expression values were normalized to the expression of the IPP2 housekeeping gene collected from the same sample using oligos (5′-gtatgagttgcttctccagcaaag-3′) (SEQ ID NO: 183) and (5′-gaggatggctgcaacaagtgt-3′) (SEQ ID NO: 184).

[0420] Bisulfite Sequencing and Data Analysis

[0421] Whole genome bisulfite sequencing (BS-Seq) libraries were generated as previously reported (Cokus et al., 2008) and all libraries were sequenced using the HiSeq 4000 platform following manufacturer instructions (Illumina) at a length of 50 bp. BS-Seq reads were aligned to the TAIR10 version of the Arabidopsis thaliana reference genome using BS-map-2.74. For BS-Seq, up to 2 mismatches were allowed and only uniquely mapped reads were used.

### Results

[0422] ROS1 is an example of a gene whose expression depends on DNA methylation. Methylation mutants with lower DNA methylation in the ROS1 promoter show reduced ROS1 expression (Lei M, et al. (2015) Regulatory link between DNA methylation and active demethylation in Arabidopsis. Proc Natl Acad Sci 112(11):3553-3557; Williams B P, Pignatta D, Henikoff S, Gehring M (2015) Methylation-Sensitive Expression of a DNA Demethylase Gene Serves As an Epigenetic Rheostat. PLoS Genet 11(3):1-18.). To explore if ROS1gRNA2_U6_NOS_TET1CD_2xNLS_1xHA_sfGFP_scFv_UBQ10_INSULATOR_UBQ10_dCAS9_1xHA_3xNLS_10xGCN422aa_OCS can trigger demethylation and repress ROS1 expression, wild-type Col-0 plants were transformed with the ROS1gRNA2_U6_NOS_TET1CD_2xNLS_1xHA_sfGFP_scFv_UBQ10_INSULATOR_UBQ10_dCAS9_1xHA_3xNLS_10xGCN422aa_OCS construct described above. ROS1 expression was assayed using qPCR, and the results are presented in FIG. 21. The results presented in FIG. 21 demonstrate that targeting the TET1 catalytic domain (TET1-CD) to the ROS1 locus using the SunTag targeting scheme can efficiently repress ROS1 expression.

[0423] To test if repression of ROS1 expression in plants containing the ROS1gRNA2_U6_NOS_TET1CD_2xNLS_1xHA_sfGFP_scFv_UBQ10_INSULATOR_UBQ10_dCAS9_1xHA_3xNLS_10xGCN422aa_OCS construct described in FIG. 20 is due to the loss of methylation in the ROS1 promoter, whole-genome BS-Seq experiments were conducted as described above. The results, presented in FIG. 22 and FIG. 23 with differently scaled genome browser views, show a loss of methylation in the ROS1 promoter in backgrounds that contain the ROS1gRNA2_U6_NOS_TET1CD_2xNLS_1xHA_sfGFP_scFv_UBQ10_INSULATOR_UBQ10_dCAS9_1xHA_3xNLS_10xGCN422aa_OCS construct.

[0424] The results presented in this Example demonstrate that the specific targeting of the TET1 catalytic domain to a genomic region of interest can be used to target demethylation and gene repression in plants in a very specific manner. This Example shows that the SunTag system can be used to modify the methylation state of regulatory regions in the Arabidopsis genome. It provides the opportunity to explore the regulatory networks controlling the gene expression of specific loci.

### Example 8

### DNA-Binding Domain-Targeting of Demethylation Factor TET1 (Catalytic Domain) to the CACTA1 Locus in Arabidopsis

[0425] This Example demonstrates the targeting of the catalytic domain of a TET1 protein to the CACTA1 locus in Arabidopsis using synthetic Zinc Finger polypeptides.

[0426] Example 1 describes the successful TET1 polypeptide targeting scheme using a synthetic zinc finger designed to target the FWA locus. This Example describes a similar successful targeting scheme using a synthetic zinc finger designed to target the CACTA1 locus.

### Materials and Methods

[0427] Cloning of pUBQ10::ZF1CACTA1-3xFlag_TET1CD and pUBQ10::ZF2CACTA1_3xFlag_TET1CD

[0428] For this purpose, a modified pMDC123 plasmid (Curtis et al, 2003, Plant Phys) was created first, containing 1990 bp of the promoter region of the Arabidopsis UBQ10 gene upstream of a cassette containing a HpaI restriction site and a 3xFlag tag creating a pMDC123 pUBQ10_3xFlag vector. Both UBQ10 promoter and 3xFlag are upstream of the gateway cassette (Invitrogen) present in the original pMDC123 plasmid. The TET1cd was delivered into the modified pMDC123 by an LR reaction (Invitrogen), creating an in-frame fusion of the TET1cd cDNA with the upstream 3xFlag cassette resulting in a pMDC123 pUBQ10_3xFlag_TET1cd vector. ZF1CACTA1 or ZF2CACTA1 sequences were plant codon optimized and synthesized by IDT and cloned in the Hpal restriction site in the modified pMDC123_3xFlag_TET1cd plasmid by In-Fusion (Takara) resulting in the creation of pMDC123 pUBQ10_ZHCACTA1_3xFlag_TET1cd or pMDC123 pUBQ10_ZF2CACTA1_3xFlag_TET1cd vectors.

[0429] The nucleotide sequences of pUBQ10::ZF1CACTA1_3xFlag_TET1CD and pUBQ10::ZF2CACTA1_3xFlag_TET1CD are presented in SEQ ID NO: 146 and SEQ ID NO: 147, respectively. This expression cassette contains a UBQ10 promoter (SEQ ID NO: 22), the ZF1CACTA1 or ZF2CACTA1 DNA binding domains that targets the CACTA1 promoter (SEQ ID NO: 148 or SEQ ID NO: 149, respectively), a 3X Flag tag (SEQ ID NO: 24), the catalytic domain of human TET1 (SEQ ID NO: 25), and an OCS terminator sequence (SEQ ID NO: 26). pUBQ10::ZF1CACTA1_3xFlag_TET1CD and pUBQ10::ZF2CACTA1_3xFlag_TET1CD expression cassettes encode the ZF1CACTA1_3xFlag_TET1CD (SEQ ID NO: 150) or ZF2CACTA1_3xFlag_TET1CD (SEQ ID NO: 151) fusion proteins, respectively. Polypeptides in each fusion protein include ZF1CACTA1 (SEQ ID NO: 152) or ZF2CACTA1 (SEQ ID NO: 153), 3xFlag (SEQ ID NO: 29), and human TET1-CD (SEQ ID NO: 30).

[0430] Plant Transformation

[0431] The transgenes above were introduced into Col-0 wild-type Arabidopsis plants using Agrobacterium-mediated transformation. T1 transgenic plants were selected based on their resistance to BASTA.

[0432] Bisulfite Sequencing and Data Analysis

[0433] BS-Seq libraries were generated as previously reported (Cokus et al., 2008) and all libraries were sequenced using the HiSeq 2000 platform following manufacturer instructions (Illumina) at a length of 50 bp. Bisulfite-Seq (BS-Seq) reads were aligned to the TAIR10 version of the Arabidopsis thaliana reference genome using BS-seeker. For BS-Seq, up to 2 mismatches were allowed and only uniquely mapped reads were used.

[0434] Metaplot of WGBS Data

[0435] Metaplots of WGBS data were made using custom Perl and R scripts. Regions of interest were broken into 50 bins while flanking 1 kb regions were each broken into 25 bins. CG, CHG and CHH methylation levels in each bin were then determined. Metaplots were then generated with R.

[0436] RNA-seq

[0437] Raw reads in qseq format obtained from the sequencer were first converted to fastq format with a customized perl script. Read quality was controlled with FastQC (http://www.bioinformatics.babraharn.ac.uk/projects/fastgc). High quality reads were then aligned to the TAIR10 reference genome using Tophat (Trapnell et al, 2009) (v 2.0.13) by using ‘-no-coverage-search’ option, allowing up to two mismatches and only keeping reads that mapped to one location. Essentially, reads were first mapped to the TAIR10 gene annotation with known splice junctions. When reads did not map to the annotated genes, the reads were mapped to the TAIR10 genome. The number of reads mapping to genes were calculated by HTseq (Anders et al., 2015) (v 0.5.4) with default parameters. Expression levels were determined by RPKM (reads per kilobase of exons per million aligned reads) in R using customized scripts.

[0438] Quantitative Real-Time PCR

[0439] To assess the level of CACTA1 gene expression, quantitative Real-time PCR (qPCR) was done using the oligos (5′-agtgtttcaatcaaggcgtttc-3′) (SEQ ID NO: 185) and (5′-cacccaatggaacaaagtgaac-3′) (SEQ ID NO: 186) to amplify a region of the CACTA1 gene. As an internal control, CACTA1 expression values were normalized to the expression of the IPP2 housekeeping gene collected from the same sample using oligos (5′-gtatgagttgcttctccagcaaag-3′) (SEQ ID NO: 187) and (5′-gaggatggctgcaacaagtgt-3′) (SEQ ID NO: 188).

### Results

[0440] To test if ZF1CACTA1_TET1-CD or ZF2CACTA1_TET1-CD can reactivate the expression of CACTA1, wild-type Col-0 plants were transformed with either the pUBQ10::ZF1CACTA1_3xFlag_TET1CD or the pUBQ10::ZF2CACTA1_3xFlag_TET1CD construct described above. Expression of CACTA1 was assayed by RNAseq of individual T1 transgenic plants. The results presented in FIG. 24 demonstrate that the catalytic domain of human TET1 fused to either ZF1CACTA1 or ZF2CACTA1 can efficiently activate the expression of CACTA1.

[0441] To test if reactivation of CACTA1 expression in plants containing the pUB Q10::ZF1CACTA1_3xFlag_TET1CD or pUBQ10::ZF2CACTA1_3xFlag_TET1CD transgenes described in FIG. 24 is due to the loss of methylation in the CACTA1 promoter, whole-genome BS-Seq experiments were conducted as described above. The results, presented in FIG. 25 and FIG. 26 for plants containing either the pUB Q10::ZF1CACTA1_3xFlag_TET1CD transgene or the pUBQ10::ZF2CACTA1_3xFlag_TET1CD transgene, show a loss of methylation in the CACTA1 promoter in both backgrounds.

[0442] To test the specificity of the targeted demethylation caused by the expression of the pUBQ10::ZF1CACTA1_3xFlag_TET1CD or the pUBQ10::ZF2CACTA1_3xFlag_TET1CD transgene in T1 plants, genome-wide methylation levels and methylation levels over all protein coding genes or TEs was checked and compared with that of a Col-0 control plant. The results, presented in FIG. 27 and FIG. 28, show that genome-wide DNA methylation levels across the entire genome were slightly reduced as compared to the Col-0 control in plants containing either the pUBQ10::ZF1CACTA1_3xFlag_TET1CD or the pUBQ10::ZF2CACTA1_3xFlag_TET1CD transgene, indicating a partial non-specific global demethylation. Although this non-specific genome-wide demethylation had minor effects, it suggests that it is important to carefully screen through several transgenic lines to find ones with limited off target activity, while retaining high levels of on target demethylation.

[0443] To test if the upregulation of CACTA1 gene expression in T2 backgrounds that have either retained the ZF1CACTA1_TET1-CD transgene or had the transgene segregated away is heritable, CACTA1 expression was checked using qPCR as described above. The results presented in FIG. 29 show that in backgrounds that have retained the ZF1CACTA1_TET1-CD transgene, CACTA1 gene expression continues to be upregulated, while in backgrounds that have lost the transgene, expression has been silenced to wild type levels.

[0444] To test if the loss of methylation in the CACTA1 promoter in plants containing the pUBQ10::ZF1CACTA1_3xFlag_TET1CD or the pUBQ10::ZF2CACTA1_3xFlag_TET1CD transgene is heritable, whole-genome BS-Seq experiments were conducted as described above on T2 plants that have either retained the pUBQ10::ZF1CACTA1_3xFlag_TET1CD or the pUBQ10::ZF2CACTA1_3xFlag_TET1CD transgene, or had the transgene segregated away. The results, presented in FIG. 30 and FIG. 31 for plants containing either the pUBQ10::ZF1CACTA1_3xFlag_TET1CD transgene or the pUBQ10::ZF2CACTA1_3xFlag_TET1CD transgene, show a loss of methylation in the CACTA1 promoter in backgrounds that have retained the transgene, while backgrounds that have lost the transgene show a re-establishment of methylation levels similar to Col-0.

[0445] The re-establishment of methylation and silencing of CACTA1 after the removal of the TET1CD transgene was is in contrast to FWA, where methylation loss was stable in the absence of the transgene, and without wishing to be bound by theory, is likely a consequence of the incomplete removal of DNA methylation in the CACTA1 region that is then able to attract the methylation machinery through self-reinforcing mechanisms. The incomplete demethylation of CACTA1 likely leaves enough residual methylation to attract the RdDM machinery, probably via recruitment of Pol V by the methyl DNA binding proteins SUVH2 and SUVH9 (Johnson L M, et al. (2014) SRA- and SET-domain-containing proteins link RNA polymerase V occupancy to DNA methylation. Nature 507(7490):124-8.). In addition, the MET1 CG methyltransferase would likely perpetuate and potentially amplify any remaining methylated CG sites. In this scenario, heritable demethylation might be more efficiently achieved by targeting the TET lcd to multiple adjacent locations to achieve a more complete demethylation. Alternatively, and without wishing to be bound by theory, CACTA1 remethylation may occur because other methylated regions in the genome with sequences homologous to CACTA1 may be able to efficiently target remethylation in trans via siRNAs. In this scenario it may be useful to simultaneously target all homologous sequences for demethylation to reduce the prevalence of remethylation by homologous sequences.

[0446] To test the specificity of the targeted demethylation caused by the expression of the pUBQ10::ZF1CACTA1_3xFlag_TET1CD or the pUBQ10::ZF2CACTA1_3xFlag_TET1CD system, genome-wide methylation levels and methylation levels over all protein coding genes or TEs of T2 plants that contained the transgene (=) or had it segregated away (−) were checked and compared with that of a Col-0 control plant. The results, presented in FIG. 32 and FIG. 33, show that genome-wide DNA methylation levels across the entire genome were reduced as compared to the Col-0 control in plants that had retained either the pUBQ10::ZF1CACTA1_3xFlag_TET1CD or the pUB Q10::ZF2CACTA1_3xFlag_TET1CD transgene. However, in T2 plants that have had the transgene segregated away, genome-wide DNA methylation levels returned to levels similar to that seen in the Col-0 control background.

### Example 9

### DNA-Binding Domain-Targeting of Demethylation Factor TET1 (Catalytic Domain) to the ROSI Locus in Arabidopsis

[0447] This Example demonstrates the targeting of the catalytic domain of a TET1 protein to the ROS1 locus in Arabidopsis using synthetic Zinc Finger polypeptides.

[0448] Examples 1 and 8 describe the successful TET1 polypeptide targeting scheme using a synthetic zinc finger designed to target the FWA or CACTA1 loci, respectively. This Example describes a similar successful targeting scheme using a synthetic zinc finger designed to target the ROS1 locus.

### Materials and Methods

[0449] Cloning of pUBQ10::ZF1ROS1_3xFlag_TET1CD

[0450] For this purpose, a modified pMDC123 plasmid (Curtis et al, 2003, Plant Phys) was created first, containing 1990 bp of the promoter region of the Arabidopsis UBQ10 gene upstream of a cassette containing a HpaI restriction site and a 3xFlag tag creating a pMDC123 pUBQ10_3xFlag vector. Both UBQ10 promoter and 3xFlag are upstream of the gateway cassette (Invitrogen) present in the original pMDC123 plasmid. The TET lcd was delivered into the modified pMDC123 by an LR reaction (Invitrogen), creating an in-frame fusion of the TET1cd cDNA with the upstream 3xFlag cassette resulting in a pMDC123 pUBQ10_3xFlag_TET1cd vector. The ZF1ROS1 sequences was plant codon optimized and synthesized by IDT and cloned in the Hpal restriction site in the modified pMDC123_3xFlag_TET1cd plasmid by In-Fusion (Takara) creating the pMDC123 pUBQ10_ZF1ROS1_3xFlag_TET1 cd vector.

[0451] The nucleotide sequence of pUBQ10::ZF1ROS1_3xFlag_TET1CD is presented in SEQ ID NO: 154. This expression cassette contains a UBQ10 promoter (SEQ ID NO: 22), the ZF1ROS1 DNA binding domain that targets the ROS1 promoter (SEQ ID NO: 155), a 3X Flag tag (SEQ ID NO: 24), the catalytic domain of human TET1 (SEQ ID NO: 25), and an OCS terminator sequence (SEQ ID NO: 26). pUBQ10::ZF1ROS1_3xFlag_TET1CD expression cassette encodes the ZF1ROS1_3xFlag_TET1CD (SEQ ID NO: 156) fusion protein. Polypeptides in this fusion protein include ZF1ROS1 (SEQ ID NO: 157), 3xFlag (SEQ ID NO: 29), and human TET1-CD (SEQ ID NO: 30).

[0452] Plant Transformation

[0453] The construct above was introduced into Col-0 wild-type Arabidopsis plants using Agrobacterium-mediated transformation. T1 transgenic plants were selected based on their resistance to BASTA.

[0454] Bisulfite Sequencing and Data Analysis

[0455] BS-Seq libraries were generated as previously reported (Cokus et al., 2008) and all libraries were sequenced using the HiSeq 2000 platform following manufacturer instructions (Illumina) at a length of 50 bp. Bisulfite-Seq (BS-Seq) reads were aligned to the TAIR10 version of the Arabidopsis thaliana reference genome using BS-seeker. For BS-Seq, up to 2 mismatches were allowed and only uniquely mapped reads were used.

[0456] Metaplot of WGBS Data

[0457] Metaplots of WGBS data were made using custom Perl and R scripts. Regions of interest were broken into 50 bins while flanking 1 kb regions were each broken into 25 bins. CG, CHG and CHH methylation levels in each bin were then determined. Metaplots were then generated with R.

[0458] RNA-seq

[0459] Raw reads in qseq format obtained from the sequencer were first converted to fastq format with a customized perl script. Read quality was controlled with FastQC (http://www.bioinformatics.babraham.ac.uk/projects/fastqc). High quality reads were then aligned to the TAIR10 reference genome using Tophat (Trapnell et al, 2009) (v 2.0.13) by using ‘-no-coverage-search’ option, allowing up to two mismatches and only keeping reads that mapped to one location. Essentially, reads were first mapped to the TAIR10 gene annotation with known splice junctions. When reads did not map to the annotated genes, the reads were mapped to the TAIR10 genome. The number of reads mapping to genes were calculated by HTseq (Anders et al., 2015) (v 0.5.4) with default parameters. Expression levels were determined by RPKM (reads per kilobase of exons per million aligned reads) in R using customized scripts.

### Results

[0460] ROS1 is an example of a gene whose expression depends on DNA methylation. Methylation mutants with lower DNA methylation in the ROS1 promoter show reduced ROS1 expression (Lei M, et al. (2015) Regulatory link between DNA methylation and active demethylation in Arabidopsis. Proc Natl Acad Sci 112(11):3553-3557; Williams B P, Pignatta D, Henikoff S, Gehring M (2015) Methylation-Sensitive Expression of a DNA Demethylase Gene Serves As an Epigenetic Rheostat. PLoS Genet 11(3):1-18.). To test if ZF1ROS1_TET1-CD can repress the expression of ROS1, wild-type Col-0 plants were transformed with the pUBQ10::ZF1ROS1_3xFlag_TET1CD construct described above. Expression of ROS1 was assayed in one wild-type Col-0 plant and two individual T1 transgenic plants by RNA-seq (FIG. 34). The results presented in FIG. 34 demonstrate that the catalytic domain of human TETI fused to a zinc finger that targets the ROS] locus can efficiently repress the expression of ROS1.

[0461] To test if the repression of ROS1 expression in plants containing the pUBQ10::ZF1ROS1_3xFlag_TET1CD transgene described in FIG. 34 is due to the loss of methylation in the ROS1 promoter, whole-genome BS-Seq experiments were conducted as described above. The results for plants containing the pUBQ10::ZF1ROS1_3xFlag_TET1CD construct, presented in FIG. 35 and FIG. 36, show a loss of methylation in the ROS1 promoter in backgrounds that contain the pUBQ10::ZF1ROS1_3xFlag_TET1CD construct. Line 2, which showed the most demethylation (FIG. 35 and FIG. 36), also showed the most RNA downregulation (FIG. 34). This result is consistent with the aforementioned two studies which suggested that ROS1 expression is controlled by its methylation status.

[0462] To test the specificity of the targeted demethylation caused by the expression of the pUBQ10::ZF1ROS1_3xFlag_TET1CD transgene in two independent T1 plants, genome-wide methylation levels and methylation levels over all protein coding genes or TEs was analyzed and compared with that of a Col-0 control plant. The results, presented in FIG. 37 and FIG. 38, show that genome-wide DNA methylation levels of the ZF1ROS1-TET1cd-2 T1 plant across the entire genome were very slightly reduced as compared to the Col-0 control, indicating a partial non-specific global demethylation, while the methylation levels of the ZF1ROS1-TET1cd-1 line were very similar to wild type. Similarly to Example 8, this underscores the need to choose lines that show minimal genome-wide effects, while showing high on target activity.

### Example 10

### Heritability and Specificity of the SunTag-Based Targeting of TET1 to the FWA Locus

[0463] In the present Example, Applicant provides additional evidence that the SunTag targeting scheme described in Example 5 is able target a TETI polypeptide to the FWA locus in Arabidopsis using the CRISPR-CAS9 system. The heritability and specificity of this SunTag targeting scheme is also evaluated.

### Materials and Methods

[0464] Constructs

[0465] Construction of the gRNA4_U6_NOS_TET1CD_2xNLS_1xHA_sfGFP_scFv_UBQ10_INSULATOR_UBQ10_dCAS9_1xHA_3xNLS_10xGCN422aa_OCS was described in Example 5.

[0466] Construction of the gRNA4_U6_NOS_TET1CD_2xNLS_1xHA_sfGFP_scFv_UBQ10_INSULATOR_UBQ10_dCAS9_1xHA_3xNLS_10xGCN414aa_OCS was described in Example 5.

[0467] Plant Transformation and Flowering Time Measurement

[0468] The constructs described above were transformed into Col-0 wild-type plants using Agrobacterium-mediated genetic transformation (after the construct was transformed into Agrobacterium). Among a segregating population of T2 plants carrying either the gRNA4_U6_NOS_TET1CD_2xNLS_1xHA_sfGFP_scFv_UBQ10_INSULATOR_UBQ10_dCAS9_1xHA_3xNLS_10xGCN422aa_OCS or the gRNA4_U6_NOS_TET1CD_2xNLS_1xHA_sfGFP_scFv_UBQ10_INSULATOR_UBQ10_dCAS9_1xHA_3xNLS_10xGCN414aa_OCS transgene, flowering time was measured and compared to early-flowering wild-type Col-0 and late-flowering fwa-4 plants. Flowering time was measured by counting the total number of leaves (rosette and cauline) of each individual plant.

[0469] Bisulfite Sequencing and Data Analysis

[0470] Whole genome bisulfite sequencing (BS-Seq) libraries were generated as previously reported (Cokus et al., 2008) and all libraries were sequenced using the HiSeq 4000 platform following manufacturer instructions (Illumina) at a length of 50 bp. BS-Seq reads were aligned to the TAIR10 version of the Arabidopsis thaliana reference genome using BS-map-2.74. For BS-Seq, up to 2 mismatches were allowed and only uniquely mapped reads were used.

[0471] Metaplot of WGBS Data

[0472] Metaplots of WGBS data were made using custom Perl and R scripts. Regions of interest were broken into 50 bins while flanking 1 kb regions were each broken into 25 bins. CG, CHG and CHH methylation levels in each bin were then determined. Metaplots were then generated with R.

[0473] RNA-seq

[0474] Raw reads in qseq format obtained from the sequencer were first converted to fastq format with a customized perl script. Read quality was controlled with FastQC (http://www.bioinformatics.babraham.ac.uk/projects/fastqc). High quality reads were then aligned to the TAIR10 reference genome using Tophat (Trapnell et al, 2009) (v 2.0.13) by using ‘-no-coverage-search’ option, allowing up to two mismatches and only keeping reads that mapped to one location. Essentially, reads were first mapped to the TAIR10 gene annotation with known splice junctions. When reads did not map to the annotated genes, the reads were mapped to the TAIR10 genome. The number of reads mapping to genes were calculated by HTseq (Anders et al., 2015) (v 0.5.4) with default parameters. Expression levels were determined by RPKM (reads per kilobase of exons per million aligned reads) in R using customized scripts.

[0475] Results

[0476] To test if the late flowering phenotype of a late flowering plant containing the gRNA4_U6_NOS_TET1CD_2xNLS_1xHA_sfGFP_scFv_UBQ10_INSULATOR_UBQ10_dCAS9_1xHA_3xNLS_10xGCN422aa_OCS construct or the gRNA4_U6_NOS_TET1CD_2xNLS_1 xHA_sfGFP_scFv_UBQ10_INSULATOR_UBQ10_dCAS9_1xHA_3xNLS_10xGCN414aa_OCS construct originally described in Table 5A was due to the activation of FWA expression, RNA-seq was performed as described above for the T1 lines containing the gRNA4_U6_NOS_TET1CD_2xNLS_1xHA_sfGFP_scFv_UBQ10_INSULATOR_UBQ10_dCAS9_1xHA_3xNLS_10xGCN422aa_OCS transgene or the gRNA4_U6_NOS_TET1CD_2xNLS_1xHA_sfGFP_scFv_UBQ10_INSULATOR_UBQ10_dCAS9_1xHA_3xNLS_10xGCN414aa_OCS transgene. The results presented in FIG. 39 show that FWA expression was upregulated in the transgenic lines tested as compared to expression in Col-0 wild type plants, similarly to what was seen in the late flowering fwa-4 epiallele plant.

[0477] To test if the late flowering phenotype of a late flowering plant containing the gRNA4_U6_NOS_TET1CD_2xNLS_1xHA_sfGFP_scFv_UBQ10_INSULATOR_UBQ10_dCAS9_1xHA_3xNLS_10xGCN422aa_OCS construct originally described in Table 5A is due to the loss of methylation in the FWA promoter, whole-genome BS-Seq experiments were conducted as described above. The results, presented in FIG. 40 and FIG. 41, show a loss of methylation in the FWA promoter in the plants that contains the gRNA4_U6_NOS_TET1CD_2xNLS_1xHA_sfGFP_scFv_UBQ10_INSULATOR_UBQ10_dCAS9_1xHA_3xNLS_10xGCN422aa_OCS transgene and that this demethylation was specific to the FWA promoter.

[0478] To test the heritability of the late flowering phenotype observed in Example 5 in plants containing either the gRNA4_U6_NOS_TET1CD_2xNLS_1 xHA_sfGFP_scFv_UBQ10_INSULATOR_UBQ10_dCAS9_1xHA_3xNLS_10xGCN422aa_OCS or the gRNA4_U6_NOS_TET1CD_2xNLS_1xHA_sfGFP_scFv_UBQ10_INSULATOR_UBQ10_dCAS9_1xHA_3xNLS_10xGCN414aa_OCS transgene, flowering time of a segregating population of T2 plants was assayed. The results, presented in FIG. 42, show that all plants in the T2 generation arising from T1 plants containing either the gRNA4_U6_NOS_TET1CD_2xNLS_1xHA_sfGFP_scFv_UBQ10_INSULATOR_UBQ10_dCAS9_1xHA_3xNLS_10xGCN422aa_OCS or the gRNA4_U6_NOS_TET1CD_2xNLS_1xHA_sfGFP_scFv_UBQ10_INSULATOR_UBQ10_dCAS9_1xHA_3xNLS_10xGCN414aa_OCS transgene also displayed a late flowering phenotype similar to what is seen in the fwa-4 epiallele plants. Thus, even though these T2 plants were segregating 3:1 for the TET1CD containing transgenes, all plants retained the late flowering phenotype, indicative of FWA activation.

[0479] To test if the late flowering phenotype observed in T2 plants that either contain the gRNA4_U6_NOS_TET1CD_2xNLS_1xHA_sfGFP_scFv_UBQ10_INSULATOR_UBQ10_dCAS9_1xHA_3xNLS_10xGCN422aa_OCS or the gRNA4_U6_NOS_TET1CD_2xNLS_1xHA_sfGFP_scFv_UBQ10_INSULATOR_UBQ10_dCAS9_1xHA_3xNLS_10xGCN414aa_OCS transgene, or where the transgene had been segregated away, is due to a loss of methylation at the FWA promoter, whole genome BS-Seq experiments were conducted on individual plants that had retained or lost the transgene in the T2 generation as described above. The results, presented in FIG. 43, FIG. 44, and FIG. 45 show a loss of methylation in the FWA promoter in backgrounds that have either retained the transgene or have had the transgene segregated away. Thus, TET1CD mediated demethylation of FWA is stable in the absence of the transgene, showing that the SunTag TET1CD system can cause heritable changes in DNA methylation. This suggests that the SunTag TET1CD system can potentially be used to create new stable epialleles not found in nature.

[0480] To test the specificity of the targeted demethylation caused by the expression of either the gRNA4_U6_NOS_TET1CD_2xNLS_1xHA_sfGFP_scFv_UBQ10_INSULATOR_UBQ10_dCAS9_1xHA_3xNLS_10xGCN422aa_OCS or the gRNA4_U6_NOS_TET1CD_2xNLS_1 xHA_sfGFP_scFv_UBQ10_INSULATOR_UBQ10_dCAS9_1xHA_3xNLS_10xGCN414aa_OCS systems in T1 backgrounds and T2 backgrounds that retained the transgene or had it segregated away, genome-wide methylation was checked and compared with that of a Col-0 control plant. The results presented in FIG. 46, FIG. 47, FIG. 48, and FIG. 49 show that genome-wide DNA methylation levels were similar between T1 and T2 plants that contain either the gRNA4_U6_NOS_TET1CD_2xNLS_1xHA_sfGFP_scFv_UBQ10_INSULATOR_UBQ10_dCAS9_1xHA_3xNLS_10xGCN422aa_OCS or gRNA4_U6_NOS_TET1CD_2xNLS_1xHA_sfGFP_scFv_UBQ10_INSULATOR_UBQ10_dCAS9_1xHA_3xNLS_10xGCN414aa_OCS transgene, T2 plants where either the gRNA4_U6_NOS_TET1CD_2xNLS_1xHA_sfGFP_scFv_UBQ10_INSULATOR_UBQ10_dCAS9_1xHA_3xNLS_10xGCN422aa_OCS or gRNA4_U6_NOS_TET1CD_2xNLS_1xHA_sfGFP_scFv_UBQ10_INSULATOR_UBQ10_dCAS9_1xHA_3xNLS_10xGCN414aa_OCS transgene had been segregated away in the T2, and Col-0 control plants. Thus, the demethyation of FWA in the SunTag TET1CD system was very specific.

[0481] The results presented in this Example demonstrate that the demethylation caused by the targeting of the TETI catalytic domain using the SunTag targeting scheme to the FWA locus is specific and heritable. The specificity of this system is important because when using this tool to study locus specific DNA methylation changes, avoiding off target effects reduces any indirect effects on the expression of a locus of interest.

### Example 11

### Heritability and Specificity of the DNA Binding Domain Targeting of TET1 to the FWA Locus

[0482] In the present Example, Applicant evaluated the heritability and specificity of the Zinc Finger (ZF) targeting scheme that targets the TETI polypeptide to the FWA locus in Arabidopsis previously described in Example 1.

### Materials and Methods

[0483] Construction of: pUBQ10 ZF108 3xFlag YPet

[0484] For this purpose, a modified pMDC123 plasmid (Curtis et al, 2003, Plant Phys) was created, containing 1990 bp of the promoter region of the Arabidopsis UBQ10 gene upstream of the BLRP_ZF108_3xFlag cassette. Both UBQ10 promoter and BLRP_ZF108_3xFlag are upstream of the gateway cassette (Invitrogen) present in the original pMDC123 plasmid. YPet was amplified from a YPet containing plasmid and cloned into the pENTR/D plasmid and then delivered to the modified pMDC123 by an LR reaction. The nucleotide sequence of pUBQ10::ZF108_3xFlag_YPet is presented in SEQ ID NO: 158. This expression cassette contains a UBQ10 promoter (SEQ ID NO: 22), the ZF108 DNA-binding domain that targets the FWA promoter (SEQ ID NO: 23), a 3X Flag tag (SEQ ID NO: 24), the YPet expression domain (SEQ ID NO: 159), and an OCS terminator sequence (SEQ ID NO: 26). The pUBQ10::ZF108_3xFlag_YPet expression cassette encodes the ZF108_3xFlag_YPet fusion protein, whose amino acid sequence set forth in SEQ ID NO: 160. Polypeptides in the fusion protein include ZF108 (SEQ ID NO: 28), 3xFlag (SEQ ID NO: 29), and YPet (SEQ ID NO: 161).

[0485] Flowering Time Measurement

[0486] In plants of the T3 generation that have retained the pUBQ10::ZF108_3xFlag_TET1-CD transgene described in Example 1, or have had the transgene segregated away, flowering time was measured and compared to early-flowering wild-type Col-0, homozygous T3 plants carrying the pUBQ10_ZF108_3xFlag_YPet transgene, and late-flowering fwa-4 plants. Flowering time was measured by counting the total number of leaves (rosette and cauline) of each individual plant.

[0487] Bisulfite Sequencing and Data Analysis

[0488] Whole genome bisulfite sequencing (BS-Seq) libraries were generated as previously reported (Cokus et al., 2008) and all libraries were sequenced using the HiSeq 2000 platform following manufacturer instructions (Illumina) at a length of 50 bp. BS-Seq reads were aligned to the TAIR10 version of the Arabidopsis thaliana reference genome using BS-map-2.74. For BS-Seq, up to 2 mismatches were allowed and only uniquely mapped reads were used.

[0489] Metaplot of WGBS Data

[0490] Metaplots of WGBS data were made using custom Perl and R scripts. Regions of interest were broken into 50 bins while flanking 1 kb regions were each broken into 25 bins. CG, CHG and CHH methylation levels in each bin were then determined. Metaplots were then generated with R.

[0491] RNA-seq

[0492] Raw reads in qseq format obtained from the sequencer were first converted to fastq format with a customized perl script. Read quality was controlled with FastQC (http://www.bioinformatics.babraham.ac.uk/projects/fastqc). High quality reads were then aligned to the TAIR10 reference genome using Tophat (Trapnell et al, 2009) (v 2.0.13) by using ‘-no-coverage-search’ option, allowing up to two mismatches and only keeping reads that mapped to one location. Essentially, reads were first mapped to the TAIR10 gene annotation with known splice junctions. When reads did not map to the annotated genes, the reads were mapped to the TAIR10 genome. The number of reads mapping to genes were calculated by HTseq (Anders et al., 2015) (v 0.5.4) with default parameters. Expression levels were determined by RPKM (reads per kilobase of exons per million aligned reads) in R using customized scripts.

### Results

[0493] As previously shown in Example 1, T1 plants containing the pUBQ10::ZF108_3xFlag_TET1-CD transgene were late flowering like fwa-4 plants as compared to Col-0 controls (FIG. 50A). To test if the late flowering phenotypes observed in plants containing the pUBQ10::ZF108_3xFlag_TET1-CD transgene in Example 1 was heritable in the next generation, flowering time of populations of T3 plants that had either retained the pUBQ10::ZF108_3xFlag_TET1-CD transgene or plants where the pUBQ10::ZF108_3xFlag_TET1-CD transgene was segregated away in the T2 were assayed along with Col-0, fwa-4 and T3 plants containing the pUBQ10_ZF108_3xFlag_YPet control transgene. The results, presented in FIG. 50B, show that all plants that have either retained the pUBQ10::ZF108_3xFlag_TET1-CD transgene or where the pUBQ10::ZF108_3xFlag_TET1-CD transgene was segregated away in the T2, showed a later flowering phenotype. This demonstrated that the late flowering phenotype caused by the TET1-CD is heritable even in the absence of the TET1-CD transgene. In addition, control plants expressing a fusion of ZF108 to the fluorescent protein YPet (ZF108-YPet) did not show any effect on flowering time, indicating that the late flowering phenotype observed is not simply a consequence of ZF108 binding to the FWA promoter (FIG. 50B).

[0494] To test if the observed late flowering phenotype in T1 plants containing the pUBQ10::ZF108_3xFlag_TET1-CD transgene was due to FWA activation, RNA-seq was performed with one Col-0, one fwa-4, and four independent T1 lines containing the pUBQ10::ZF108_3xFlag_TET1-CD transgene. FIG. 51A shows that FWA is activated in plants containing the transgene to a similar level observed in fwa-4 plants. RNA-seq was also performed with four biological replicates from two independent T3 lines containing the pUBQ10::ZF108_3xFlag_TET1-CD transgene, four biological replicates from two independent T3 lines containing pUBQ10::ZF108_3xFlag_YPet, and four biological replicates of Col-0 control plants. The results presented in FIG. 51B show that FWA was upregulated in all pUBQ10::ZF108_3xFlag_TET1-CD plants tested, but not in the pUBQ10::ZF108_3xFlag_YPet or Col-0 plants. These results, in addition to those shown in FIG. 5 of Example 1, demonstrate that activation of FWA caused by the specific targeting of the TET1 catalytic domain to a genomic region can be heritable over multiple generations. In addition, control plants expressing pUBQ10::ZF108_3xFlag_YPet did not show any effect on FWA expression, showing that the FWA overexpression phenotype observed in pUBQ10::ZF108_3xFlag_TET1-CD plants is not simply a consequence of ZF108 binding to the FWA promoter. RNA-seq data showed very few additional changes and revealed FWA as the most upregulated gene in the ZF108-TET1cd lines as compared to ZF108-YPet control lines (FIG. 52). These results demonstrate successful removal of methylation at the FWA promoter and activation of FWA expression and, importantly, very few off-target effects due to ZF108-TET1cd expression.

[0495] To test if the late flowering phenotype observed in the T3 plants was due to a loss of methylation at the FWA promoter, whole genome BS-Seq experiments were conducted on individual plants that had retained or lost the transgene as described above. The results, presented in FIG. 53, FIG. 54, and FIG. 55 show that loss of methylation caused by the specific targeting of the TET1 catalytic domain to a genomic region can be heritable over multiple generations even in plants that have had the pUBQ10::ZF108_3xFlag_TET1-CD transgene segregated away. These results also show that methylation in regions adjacent to FWA showed very little change in methylation, showing that targeting of the TET1-CD to FWA causes highly localized and precise demethyation.

[0496] To test the specificity of the targeted demethylation caused by the expression of the pUBQ10::ZF108_3xFlag_TET1-CD system in T1 plants, T3 plants that retained the transgene, or T3 plants that had the transgene segregated away, genome-wide methylation was analyzed and compared with that of a Col-0 control plant. The results presented in FIG. 56, FIG. 57, FIG. 58, and FIG. 59 show that genome-wide DNA methylation levels were similar between all backgrounds examined. In T3 plants that had retained or lost the transgene, methylation levels over protein coding genes and transposable elements were also analyzed. The results presented in FIG. 60 show that over protein coding genes and transposable elements methylation levels were similar among all backgrounds examined. These data show that expression of the TET1-CD in these plants showed very little genome-wide effects on methylation levels.

[0497] The results presented in this example demonstrate that the demethylation caused by the targeting of the TETI catalytic domain using the ZF targeting scheme to the FWA locus is highly specific and heritable. Thus, specific and highly efficient ZF proteins can be designed for targeted demethylation of genomic regions of interest, for both research and agricultural purposes.

### Example 12

### SunTag Control Transgenes that are Not Targeted to a Specific Locus

[0498] In the present Example, Applicant used the SunTag targeting scheme without a specific guide RNA to demonstrate that the targeting of demethylation by TET1-CD requires a specific guide RNA and is therefore not caused by non-specific expression of the TET1-CD.

[0499] Example 4 describes a SunTag-based targeting scheme to target a TET lcatalytic polypeptide to a target nucleic acid. This Example describes a SunTag targeting scheme in which a TET1 polypeptide was not targeted to any locus in Arabidopsis using the CRISPR-CAS9 system. A schematic of the targeting system is presented in FIG. 61.

### Materials and Methods

[0500] Construction of:
[0501] NOS_TET1CD_2xNLS_1 xHA_sfGFP_scFv_UBQ10_INSULATOR_UBQ10 dCAS9_1xHA_3xNLS_10xGCN422aa_OCS and NOS_TET1CD_2xNLS_1xHA_sfGFP_scFv_UBQ10_INSULATOR_UBQ10dCAS9_1xHA_3xNLS_10xGCN414aa_OCS

[0502] For this purpose, a dCAS9_1xHA_3xNLS_10xGCN4 that contains a 22aa spacer between epitopes (dCAS9_1xHA_3xNLS_10xGCN422aa) and a dCAS9_1xHA_3xNLS_10xGCN4 that contains a 14aa spacer between epitopes (dCAS9_1xHA_3xNLS_10xGCN414aa) was created through a combination of gene synthesis and the utilization of plasmids from Addgene, and separately cloned into a modified pMTN3164 plasmid downstream of a fragment containing 1994 bp of the promoter region of the Arabidopsis UBQ10 gene followed by an omega RBC translational enhancer and upstream of an OCS terminator creating pMTN3164 UBQ10_dCAS9_1xHA_3xNLS_10xGCN422aa_OCS and pMTN3164 UBQ10_dCAS9_1xHA_3xNLS_10XGCN414aa_OCS. An insulator sequence followed by a second fragment containing 1994 bp of the promoter region of the Arabidopsis UBQ10 gene was then cloned upstream of pMTN3164 UBQ10_dCAS9_1xHA_3xNLS_10xGCN422aa_OCS and pMTN3164 UBQ10_dCAS9_1xHA_3xNLS_10XGCN414aa_OCS such that transcription of downstream targets resulting from this second UBQ10 promoter would occur opposite the dCAS9_1xHA_3xNLS_10xGCN422aa or dCAS9_1xHA_3xNLS_10xGCN414aa transcription. A scFv_sfGFP_1XHA_2XNLS_TET1CD sequence created through a combination of gene synthesis and the utilization of plasmids from Addgene was then cloned downstream of the second UBQ10 promoter in both vectors creating pMTN3164 TET1CD_2xNLS_1xHA_sfGFP_scFv_UBQ10_INSULATOR_UBQ10_dCAS9_1xHA_3xNLS_10xGCN422aa_OCS and pMTN3164 TET1CD_2xNLS_1xHA_sfGFP_scFv_UBQ10_INSULATOR_UBQ10_dCAS9_1xHA_3xNLS_10xGCN414aa_OCS. A NOS terminator was then cloned downstream of TET1cd in both TET1CD_2xNLS_1xHA_sfGFP_scFv_UBQ10_INSULATOR_UBQ10_dCAS9_1xHA_3xNLS_10xGCN422aa_OCS and TET1CD_2xNLS_1 xHA_sfGFP_scFv_UBQ10_INSULATOR_UBQ10_dCAS9_1xHA_3xNLS_10xGCN414aa_OCS constructs creating pMTN3164 NOS_TET1CD_2xNLS_1xHA_sfGFP_scFv_UBQ10_INSULATOR_UBQ10_dCAS9_1xHA_3xNLS_10xGCN422aa_OCS and pMTN3164 NOS_TET1CD_2xNLS_1 xHA_sfGFP_scFv_UBQ10_INSULATOR_UBQ10_dCAS9_1xHA_3xNLS_10xGCN414aa_OCS constructs.

[0503] The expression cassette of NOS_TET1CD_2xNLS_1xHA_sfGFP_scFv_UBQ10_INSULATOR_UBQ10_dCAS9_1xHA_3xNLS_10xGCN422aa_OCS and NOS_TET1CD_2xNLS_1xHA_sfGFP_scFv_UBQ10_INSULATOR_UBQ10_dCAS9_1xHA_3xNLS_10xGCN414aa_OCS differ only in the 10xGCN4 sequence. These vectors contain a number of features. The nucleotide sequences of NOS_TET1CD_2xNLS_1xHA_sfGFP_scFv_UBQ10_INSULATOR_UBQ10_dCAS9_1xHA_3xNLS_10xGCN422aa_OCS and NOS_TET1CD_2xNLS_1xHA_sfGFP_scFv_UBQ10_INSULATOR_UBQ10_dCAS9_1xHA_3xNLS_10xGCN414aa_OCS expression cassettes are presented in SEQ ID NO: 162 and SEQ ID NO: 163, respectively. These cassettes are described as single cassettes, but contain different expression regions: (1) one that encodes the dCAS9-10xGCN4 fusion protein and (2) one that encodes the scFv-sfGFP-TET1-CD fusion protein. The cassette includes, a UBQ10 promoter (SEQ ID NO: 108), Omega RBC (SEQ ID NO: 109), dCAS9 (SEQ ID NO: 110), lxHA (SEQ ID NO: 111), 3xNLS (SEQ ID NO: 112), 2xNLS (SEQ ID NO: 113), linkers (SEQ ID NO: 114), 10xGCN422aa (SEQ ID NO: 115) or 10xGCN414aa (SEQ ID NO: 116), OCS terminator (SEQ ID NO: 117), insulator (SEQ ID NO: 118), scFv (SEQ ID NO: 119), sfGFP (SEQ ID NO: 120), TET1-CD (SEQ ID NO: 121), and NOS terminator (SEQ ID NO: 122).

[0504] The amino acid sequence of the polypeptide fusion of dCAS9_1xHA_3xNLS_10xGCN422aa is presented in SEQ ID NO: 123 and the amino acid sequence of the polypeptide fusion of dCAS9_1xHA_3xNLS_10xGCN414aa is presented in SEQ ID NO: 124. Relevant amino acid sequences present in these fusion proteins include, for example: dCAS9 (SEQ ID NO: 125), 1X HA (SEQ ID NO: 126), 3xNLS (SEQ ID NO: 127), linker (SEQ ID NO: 128), and 10xGCN422aa (SEQ ID NO: 129) or 10xGCN414aa (SEQ ID NO: 130).

[0505] The amino acid sequence of the polypeptide fusion of scFv_sfGFP_1xHA_2xNLS_TET1CD is presented in SEQ ID NO: 131 and is identical in both NOS_TET1CD_2xNLS_1 xHA_sfGFP_scFv_UBQ10_INSULATOR_UBQ10_dCAS9_1xHA_3xNLS_10xGCN422aa_OCS and NOS_TET1CD_2xNLS_1 xHA_sfGFP_scFv_UBQ10_INSULATOR_UBQ10_dCAS9_1xHA_3xNLS_10xGCN414aa_OCS vectors. Relevant amino acid sequences present in this fusion protein include, for example: scFv (SEQ ID NO: 132), sfGFP (SEQ ID NO: 133), 1xHA (SEQ ID NO: 134), 2xNLS (SEQ ID NO: 135), Linkers (SEQ ID NO: 136), and TET1-CD (SEQ ID NO: 137).

[0506] Plant Transformation and Flowering Time Measurement

[0507] The constructs described above were transformed into Col-0 wild-type plants using Agrobacterium-mediated genetic transformation (after the construct was transformed into Agrobacterium). This process involves transforming plants via floral dip using methods well known in the art. Progeny of transformed plants (Tls) were screened for Hygromycin resistance. Among the Hygromycin-resistant transgenic plants, flowering time was measured and compared to early-flowering wild-type Col-0 and late-flowering fwa-4 plants. Flowering time was measured by counting the total number of leaves (rosette and cauline) of each individual plant.

[0508] Bisulfite Sequencing and Data Analysis

[0509] Whole genome bisulfite sequencing (BS-Seq) libraries were generated as previously reported (Cokus et al., 2008) and all libraries were sequenced using the HiSeq 4000 platform following manufacturer instructions (Illumina) at a length of 50 bp. BS-Seq reads were aligned to the TAIR10 version of the Arabidopsis thaliana reference genome using BS-map-2.74. For BS-Seq, up to 2 mismatches were allowed and only uniquely mapped reads were used.

[0510] Metaplot of WGBS Data

[0511] Metaplots of WGBS data were made using custom Perl and R scripts. Regions of interest were broken into 50 bins while flanking 1 kb regions were each broken into 25 bins. CG, CHG and CHH methylation levels in each bin were then determined. Metaplots were then generated with R.

### Results

[0512] To test if NOS_TET1CD_2xNLS_1 xHA_sfGFP_scFv_UBQ10_INSULATOR_UBQ10_dCAS9_1xH A_3xNLS_10xGCN422aa_OCS or NOS_TET1CD_2xNLS_1xHA_sfGFP_scFv_UBQ10_INSULATOR_UBQ10_dCAS9_1xHA_3xNLS_10xGCN414aa_OCS can trigger demethylation and reactivate FWA expression, wild-type Col-0 plants were transformed with the NOS_TET1CD_2xNLS_1xHA_sfGFP_scFv_UBQ10_INSULATOR_UBQ10_dCAS9_1xHA_3xNLS_10xGCN422aa_OCS or NOS_TET1CD_2xNLS_1xHA_sfGFP_scFv_UBQ10_INSULATOR_UBQ10_dCAS9_1xHA_3xNLS_10xGCN414aa_OCS transgene described above. Flowering time of T1 transgenic plants was assayed. The results, presented in FIG. 62, show that all T1 plants containing either the NOS_TET1CD_2xNLS_1xHA_sfGFP_scFv_UBQ10_INSULATOR_UBQ10_dCAS9_1xHA_3xNLS_10xGCN422aa_OCS or NOS_TET1CD_2xNLS_1xHA_sfGFP_scFv_UBQ10_INSULATOR_UBQ10_dCAS9_1xHA_3xNLS_10xGCN414aa_OCS transgene displayed an early flowering phenotype similar to that of Col-0 wild type plants. Thus, even though these T1 plants contained the NOS_TET1CD_2xNLS_1xHA_sfGFP_scFv_UBQ10_INSULATOR_UBQ10_dCAS9_1xHA_3xNLS_10xGCN422aa_OCS or NOS_TET1CD_2xNLS_1xHA_sfGFP_scFv_UBQ10_INSULATOR_UBQ10_dCAS9_1xHA_3xNLS_10xGCN414aa_OCS transgene, effects on flowering time were not observed, ruling out the possibility of non-specific FWA reactivation due to these transgenes when a gRNA is not present.

[0513] To test if the early flowering plants containing the NOS_TET1CD_2xNLS_1xHA_sfGFP_scFv_UBQ10_INSULATOR_UBQ10_dCAS9_1xHA_3xNLS_10xGCN422aa_OCS or NOS_TET1CD_2xNLS_1xHA_sfGFP_scFv_UBQ10_INSULATOR_UBQ10_dCAS9_1xHA_3xNLS_10xGCN414aa_OCS transgene described in FIG. 61 show any loss of methylation in the FWA promoter or the CACTA] promoter (described in Example 6), whole-genome BS-Seq experiments were conducted as described above. The results presented in FIG. 63 show that plants containing the NOS_TET1CD_2xNLS_1xHA_sfGFP_scFv_UBQ10_INSULATOR_UBQ10_dCAS9_1xHA_3xNLS_10xGCN422aa_OCS or NOS_TET1CD_2xNLS_1xHA_sfGFP_scFv_UBQ10_INSULATOR_UBQ10_dCAS9_1xHA_3xNLS_10xGCN414aa_OCS transgene show a level of methylation in the FWA promoter similar to that seen in the Col-0 wild type background. The results presented in FIG. 64 show that plants containing the NOS_TET1CD_2xNLS_1xHA_sfGFP_scFv_UBQ10_INSULATOR_UBQ10_dCAS9_1xHA_3xNLS_10xGCN422aa_OCS transgene show a level of methylation in the CACTA1 promoter similar to that seen in the Col-0 wild type background.

[0514] To test if the plants containing the NOS_TET1CD_2xNLS_1xHA_sfGFP_scFv_UBQ10_INSULATOR_UBQ10_dCAS9_1xHA_3xNLS_10xGCN422aa_OCS or NOS_TET1CD_2xNLS_1xHA_sfGFP_scFv_UBQ10_INSULATOR_UBQ10_dCAS9_1xHA_3xNLS_10xGCN414aa_OCS transgene showed any genome-wide changes in CG, CHG or CHH methylation levels caused by the expression of the NOS_TET1CD_2xNLS_1xHA_sfGFP_scFv_UBQ10_INSULATOR_UBQ10_dCAS9_1xHA_3xNLS_10xGCN422aa_OCS or NOS_TET1CD_2xNLS_1xHA_sfGFP_scFv_UBQ10_INSULATOR_UBQ10_dCAS9_1xHA_3xNLS_10xGCN414aa_OCS transgene, genome-wide methylation levels were checked and compared with that of a Col-0 control plant. The results presented in FIG. 65 show that genome-wide DNA methylation levels across the entire genome were similar among all backgrounds examined.

[0515] The results in this Example show that that expression of SunTag TET1-CD constructs without any specific guide RNAs show little effect on DNA methylation at specific loci or in the genome in general. These results further underscore that the SunTag TET1-CD systems is highly specific for the targeted locus. This SunTag system can therefore be used to specifically target single loci for targeted DNA methylation, or a multiplexing strategy can be taken to specifically and efficiently target multiple loci simultaneously.

### Example 13

### Targeting the Catalytic Domain of a TET2 or TET3 Polypeptide to a Target Nucleic Acid

[0516] This Example describes exemplary protocols for targeting the catalytic domain of a TET2 polypeptide or a TET3 polypeptide to a target nucleic acid to induce demethylation of the target nucleic acid.

[0517] Materials and Methods for this targeting are generally analogous to those described in prior examples. For DNA-binding domain based targeting, the methods outlined in Example 8 may be applied. For SunTag based targeting, the methods outlined in Example 6 may be applied. The catalytic domain of TET1 (TET1-CD) may be replaced with the catalytic domain of TET2 (e.g. SEQ ID NO: 192) or the catalytic domain of TET3 (e.g. SEQ ID NO: 194).

[0518] Following vector construction and plant transformation, an exemplary target nucleic acid (e.g. FWA) may be assayed via expression analysis such as qPCR to evaluate the level of expression of the target nucleic acid. Bisulfite sequencing may be used to probe the methylation status of the target nucleic acid.

[0519] It is expected that targeting the catalytic domain of TET2 or TET3 to a target nucleic acid in plants will result in decreased methylation of the target nucleic acid.

### REFERENCES

[0520] Tet proteins can convert 5-methylcytosine to 5-formylcytosine and 5-carboxylcytosine. Ito S, Shen L, Dai Q, Wu S C, Collins L B, Swenberg J A, He C, Zhang Y. Science. 2011 Sep. 2; 333(6047):1300-3. doi: 10.1126/science.1210597. Epub 2011 Jul. 21.

[0521] Hydroxylation of 5-methylcytosine by TET1 promotes active DNA demethylation in the adult brain. Guo J U, Su Y, Zhong C, Ming G L, Song H. Cell. 2011 Apr. 29; 145(3):423-34. doi: 10.1016/j.cell.2011.03.022. Epub 2011 Apr. 14.

[0522] SRA- and SET-domain-containing proteins link RNA polymerase V occupancy to DNA methylation. Johnson L M, Du J, Hale C J, Bischof S, Feng S, Chodavarapu R K, Zhong X, Marson G, Pellegrini M, Segal D J, Patel D J, Jacobsen S E. Nature. 2014 Mar. 6; 507(7490):124-8. doi: 10.1038/nature12931. Epub 2014 Jan. 22.

[0523] A CRISPR-based approach for targeted DNA demethylation.Xu X, Tao Y, Gao X, Zhang L, Li X, Zou W, Ruan K, Wang F, Xu G L, Hu R. Cell Discov. 2016 May 3; 2:16009. doi: 10.1038/celldisc.2016.9. eCollection 2016.

[0524] Editing DNA Methylation in the Mammalian Genome.Liu XS, Wu H, Ji X, Stelzer Y, Wu X, Czauderna S, Shu J, Dadon D, Young R A, Jaenisch R. Cell. 2016 Sep. 22; 167(1):233-247.e17. doi: 10.1016/j.cell.2016.08.056.

[0525] Inheritable Silencing of Endogenous Genes by Hit-and-Run Targeted Epigenetic Editing.Amabile A, Migliara A, Capasso P, Biffi M, Cittaro D, Naldini L, Lombardo A. Cell. 2016 Sep. 22; 167(1):219-232.e14. doi: 10.1016/j.cell.2016.09.006.

[0526] Targeted DNA demethylation in vivo using dCas9-peptide repeat and scFv-TET1 catalytic domain fusions. Morita S, Noguchi H, Horii T, Nakabayashi K, Kimura M, Okamura K, Sakai A, Nakashima H, Hata K, Nakashima K, Hatada I. Nat Biotechnol. 2016 Aug. 29. doi: 10.1038/nbt.3658

[0527] CRISPR-dCas9 mediated TET1 targeting for selective DNA demethylation at BRCA1 promoter. Choudhury S R, Cui Y, Lubecka K, Stefanska B, Irudayaraj J. Oncotarget. 2016 Jun. 23. doi: 10.18632/oncotarget.10234. [Epub ahead of print]

[0528] Induced DNA demethylation by targeting Ten-Eleven Translocation 2 to the human ICAM-1 promoter. Chen H, Kazemier H G, de Groote M L, Ruiters M H, Xu G L, Rots M G. Nucleic Acids Res. 2014 February; 42(3):1563-74. doi: 10.1093/nar/gkt1019. Epub 2013 Nov. 4.

[0529] Targeted DNA demethylation and activation of endogenous genes using programmable TALE-TET1 fusion proteins. Maeder M L, Angstman J F, Richardson M E, Linder S J, Cascio V M, Tsai S Q, Ho Q H, Sander J D, Reyon D, Bernstein B E, Costello J F, Wilkinson M F, Joung J K. Nat Biotechnol. 2013 December; 31(12):1137-42. doi: 10.1038/nbt.2726. Epub 2013 Oct. 9.

[0530] Trapnell, C., Pachter, L. & Salzberg, S. L. TopHat: discovering splice junctions with RNA-Seq. Bioinformatics (Oxford, England) 25, 1105-1111 (2009).

[0531] Anders, S., Pyl, P. T. & Huber, W. HTSeq—a Python framework to work with high-throughput sequencing data. Bioinformatics (Oxford, England) 31, 166-169 (2015).

[0532] Xie, X et al, Boosting CRISPR/Cas9 multiplex editing capability with the endogenous tRNA-processing system. 2015, Proc Natl Acad Sci USA. 2015 Mar. 17; 112(11):3570-5

[0533] Pastor W. A., Aravind L., Rao A. TETonic shift: biological roles of TET proteins in DNA demethylation and transcription. Nat Rev Mol Cell Biol. 14, 341-356 (2013).

[0534] Ito S., D'Alessio A. C., Taranova O. V., Hong K., Sowers L. C., Zhang Y. Role of Tet proteins in 5mC to 5hmC conversion, ES-cell self-renewal and inner cell mass specification. Nature 466, 1129-1133 (2010).

[0535] Hashimoto et al, 2014 Feb. 20: 506(7488):391-5

[0536] Ito et al, Nature, 2010, Aug. 26: 466(7310): 1129-1133

What is claimed is:

1. A method for reducing methylation of a target nucleic acid in a plant, comprising:
(a) providing a plant comprising a recombinant polypeptide comprising a DNA-binding domain and a TET 1 polypeptide or fragment thereof; and
(b) growing the plant under conditions whereby the recombinant polypeptide is targeted to the target nucleic acid, thereby reducing methylation of the target nucleic acid.

2. The method of claim 1, wherein the DNA-binding domain comprises a zinc finger domain.

3. The method of claim 2, wherein the zinc finger domain comprises two, three, four, five, six, seven, eight, or nine zinc fingers.

4. The method of claim 2, wherein the zinc finger domain is a zinc finger array.

5. The method of claim 2, wherein the zinc finger domain is selected from the group consisting of a Cys2His2 (C2H2) zinc finger domain, a CCCH zinc finger domain, a multi-cysteine zinc finger domain, and a zinc binuclear cluster domain.

6. The method of claim 1, wherein the DNA-binding domain is selected from the group consisting of a TAL effector targeting domain, a helix-turn-helix family DNA-binding domain, a basic domain, a ribbon-helix-helix domain, a TBP domain, a barrel dimer domain, a real homology domain, a BAH domain, a SANT domain, a Chromodomain, a Tudor domain, a Bromodomain, a PHD domain, a WD40 domain, and a MBD domain.

7. The method of claim 1, wherein the DNA-binding domain comprises a TAL effector targeting domain.

8. The method of claim 1, wherein the DNA-binding domain comprises three C2H2 zinc finger domains.

9. The method of any one of claims 1-8, wherein the TET1 polypeptide comprises an amino acid sequence that is at least 80% identical to SEQ ID NO: 8.

10. The method of any one of claims 1-9, wherein the target nucleic acid is an endogenous nucleic acid.

11. The method of any one of claims 1-9, wherein the target nucleic acid is a heterologous nucleic acid.

12. The method of any one of claims 1-11, wherein expression of the target nucleic acid is activated as compared to a corresponding control nucleic acid.

13. A recombinant nucleic acid comprising a plant promoter and which encodes a recombinant polypeptide comprising a DNA-binding domain and a TET1 polypeptide or fragment thereof.

14. An expression vector comprising the recombinant nucleic acid of claim 13.

15. A host cell comprising the expression vector of claim 14.

16. A recombinant plant comprising the recombinant nucleic acid of claim 13.

17. A plant having reduced methylation of a target nucleic acid as a consequence of the method of any one of claims 1-12.

18. A progeny plant of the plant of claim 17.

19. The progeny plant of claim 18, wherein the progeny plant has reduced methylation of the target nucleic acid and does not comprise the recombinant polypeptide.

20. A method for reducing methylation of a target nucleic acid in a plant, comprising:
(a) providing a plant comprising a recombinant polypeptide comprising a nuclease-deficient CAS9 polypeptide (dCAS9) or fragment thereof and a TET1 polypeptide or fragment thereof; and
a crRNA and a tracrRNA, or fusions thereof;
(b) growing the plant under conditions whereby the recombinant polypeptide is targeted to the target nucleic acid, thereby reducing methylation of the target nucleic acid.

21. The method of claim 20, wherein the TET1 polypeptide comprises an amino acid sequence that is at least 80% identical to SEQ ID NO: 8.

22. The method of any one of claims 20-21, wherein the target nucleic acid is an endogenous nucleic acid.

23. The method of any one of claims 20-21, wherein the target nucleic acid is a heterologous nucleic acid.

24. The method of any one of claims 20-23, wherein expression of the target nucleic acid is activated as compared to a corresponding control nucleic acid.

25. A recombinant nucleic acid comprising a plant promoter and which encodes a recombinant polypeptide comprising a nuclease-deficient CAS9 polypeptide (dCAS9) or fragment thereof and a TET1 polypeptide or fragment thereof.

26. An expression vector comprising the recombinant nucleic acid of claim 25.

27. A host cell comprising the expression vector of claim 26.

28. A recombinant plant comprising the recombinant nucleic acid of claim 25.

29. A plant having reduced methylation of a target nucleic acid as a consequence of the method of any one of claims 20-24.

30. A progeny plant of the plant of claim 29.

31. The progeny plant of claim 30, wherein the progeny plant has reduced methylation of the target nucleic acid and does not comprise the recombinant polypeptide.

32. A method for reducing methylation of a target nucleic acid in a plant, comprising:
(a) providing a plant comprising:
a first recombinant polypeptide comprising a nuclease-deficient CAS9 polypeptide (dCAS9) or fragment thereof and a multimerized epitope;
a second recombinant polypeptide comprising a TET1 polypeptide or fragment thereof and an affinity polypeptide that specifically binds to the epitope;
a crRNA and a tracrRNA, or fusions thereof; and
(b) growing the plant under conditions whereby the first and second recombinant polypeptides are targeted to the one or more target nucleic acids, thereby reducing methylation of the target nucleic acid.

33. A recombinant vector comprising:
a first nucleic acid sequence comprising a plant promoter and that encodes a recombinant polypeptide comprising a nuclease-deficient CAS9 polypeptide (dCAS9) or fragment thereof and a multimerized epitope;
a second nucleic acid sequence comprising a plant promoter and that encodes a recombinant polypeptide comprising a TET1 polypeptide or fragment thereof and an affinity polypeptide that specifically binds to the epitope; and
a third nucleic acid sequence comprising a promoter and that encodes a crRNA and a tracrRNA, or fusions thereof.

34. A host cell comprising the vector of claim 33.

35. A recombinant plant comprising the vector of claim 34.

36. A plant having reduced methylation of a target nucleic acid as a consequence of the method of claim 32.

37. A progeny plant of the plant of claim 36.

38. The progeny plant of claim 37, wherein the progeny plant has reduced methylation of the target nucleic acid and does not comprise the recombinant polypeptides.

39. A method for reducing methylation of a target nucleic acid in a plant, comprising:
(a) providing a plant comprising a recombinant polypeptide comprising a DNA-binding domain and a methylcytosine dioxygenase polypeptide that comprises the amino acid sequence of SEQ ID NO: 189; and
(b) growing the plant under conditions whereby the recombinant polypeptide is targeted to the target nucleic acid, thereby reducing methylation of the target nucleic acid.

40. The method of claim 39, wherein the DNA-binding domain comprises a zinc finger domain.

41. The method of claim 40, wherein the zinc finger domain comprises two, three, four, five, six, seven, eight, or nine zinc fingers.

42. The method of claim 40, wherein the zinc finger domain is a zinc finger array.

43. The method of claim 40, wherein the zinc finger domain is selected from the group consisting of a Cys2His2 (C2H2) zinc finger domain, a CCCH zinc finger domain, a multi-cysteine zinc finger domain, and a zinc binuclear cluster domain.

44. The method of claim 39, wherein the DNA-binding domain is selected from the group consisting of a TAL effector targeting domain, a helix-turn-helix family DNA-binding domain, a basic domain, a ribbon-helix-helix domain, a TBP domain, a barrel dimer domain, a real homology domain, a BAH domain, a SANT domain, a Chromodomain, a Tudor domain, a Bromodomain, a PHD domain, a WD40 domain, and a MBD domain.

45. The method of claim 40, wherein the DNA-binding domain comprises a TAL effector targeting domain.

46. The method of claim 39, wherein the DNA-binding domain comprises three C2H2 zinc finger domains.

47. The method of any one of claims 39-46, wherein the methylcytosine dioxygenase polypeptide is a TET polypeptide.

48. The method of claim 47, wherein the TET polypeptide is a TET1 polypeptide

49. The method of claim 48, wherein the TET 1 polypeptide comprises the catalytic domain of TET1.

50. The method of claim 49, wherein the TET 1 polypeptide comprises an amino acid sequence that is at least 80% identical to SEQ ID NO: 8.

51. The method of any one of claims 39-50, wherein the target nucleic acid is an endogenous nucleic acid.

52. The method of any one of claims 39-50, wherein the target nucleic acid is a heterologous nucleic acid.

53. The method of any one of claims 39-52, wherein expression of the target nucleic acid is activated as compared to a corresponding control nucleic acid.

54. A recombinant nucleic acid comprising a plant promoter and which encodes a recombinant polypeptide comprising a DNA-binding domain and a methylcytosine dioxygenase polypeptide that comprises the amino acid sequence of SEQ ID NO: 189.

55. An expression vector comprising the recombinant nucleic acid of claim 54.

56. A host cell comprising the expression vector of claim 55.

57. A recombinant plant comprising the recombinant nucleic acid of claim 54.

58. A plant having reduced methylation of a target nucleic acid as a consequence of the method of any one of claims 39-53.

59. A progeny plant of the plant of claim 58.

60. The progeny plant of claim 60, wherein the progeny plant has reduced methylation of the target nucleic acid and does not comprise the recombinant polypeptide.

61. A method for reducing methylation of a target nucleic acid in a plant, comprising:
(a) providing a plant comprising:
a first recombinant polypeptide comprising a nuclease-deficient CAS9 polypeptide (dCAS9) or fragment thereof and a multimerized epitope;
a second recombinant polypeptide comprising a methylcytosine dioxygenase polypeptide that comprises the amino acid sequence of SEQ ID NO: 189, and an affinity polypeptide that specifically binds to the epitope;
a crRNA and a tracrRNA, or fusions thereof; and
(b) growing the plant under conditions whereby the first and second recombinant polypeptides are targeted to the one or more target nucleic acids, thereby reducing methylation of the target nucleic acid.

62. A recombinant vector comprising:
a first nucleic acid sequence comprising a plant promoter and that encodes a recombinant polypeptide comprising a nuclease-deficient CAS9 polypeptide (dCAS9) or fragment thereof and a multimerized epitope;
a second nucleic acid sequence comprising a plant promoter and that encodes a recombinant polypeptide comprising a methylcyto sine dioxygenase polypeptide that comprises the amino acid sequence of SEQ ID NO: 189, and an affinity polypeptide that specifically binds to the epitope; and
a third nucleic acid sequence comprising a promoter and that encodes a crRNA and a tracrRNA, or fusions thereof.

63. A host cell comprising the vector of claim 62.

64. A recombinant plant comprising the vector of claim 63.

65. A plant having reduced methylation of a target nucleic acid as a consequence of the method of claim 61.

66. A progeny plant of the plant of claim 65.

67. The progeny plant of claim 66, wherein the progeny plant has reduced methylation of the target nucleic acid and does not comprise the recombinant polypeptides.

The application's sequence listing, which the Patent Office published only in electronic form, follows.

SEQUENCE LISTING (194 sequences)

SEQ ID NO: 1 - protein, 2136 aa, Homo sapiens
MSRSRHARPSRLVRKEDVNKKKKNSQLRKTTKGANKNVASVKTLSPGKLKQLIQERDVKKKTEPKPPVPVRSLLTRAGAARMNLDRTEVLFQNPESLTCNGFTMALRSTSLSRRLSQPPLVVAKSKKVPLSKGLEKQHDCDYKILPALGVKHSENDSVPMQDTQVLPDIETLIGVQNPSLLKGKSQETTQFWSQRVEDSKINIPTHSGPAAEILPGPLEGTRCGEGLFSEETLNDTSGSPKMFAQDTVCAPFPQRATPKVTSQGNPSIQLEELGSRVESLKLSDSYLDPIKSEHDCYPTSSLNKVIPDLNLRNCLALGGSTSPTSVIKFLLAGSKQATLGAKPDHQEAFEATANQQEVSDTTSFLGQAFGAIPHQWELPGADPVHGEALGETPDLPEIPGAIPVQGEVFGTILDQQETLGMSGSVVPDLPVFLPVPPNPIATFNAPSKWPEPQSTVSYGLAVQGAIQILPLGSGHTPQSSSNSEKNSLPPVMAISNVENEKQVHISFLPANTQGFPLAPERGLFHASLGIAQLSQAGPSKSDRGSSQVSVTSTVHVVNTTVVTMPVPMVSTSSSSYTTLLPTLEKKKRKRCGVCEPCQQKTNCGECTYCKNRKNSHQICKKRKCEELKKKPSVVVPLEVIKENKRPQREKKPKVLKADFDNKPVNGPKSESMDYSRCGHGEEQKLELNPHTVENVTKNEDSMTGIEVEKWTQNKKSQLTDHVKGDFSANVPEAEKSKNSEVDKKRTKSPKLFVQTVRNGIKHVHCLPAETNVSFKKFNIEEFGKTLENNSYKFLKDTANHKNAMSSVATDMSCDHLKGRSNVLVFQQPGFNCSSIPHSSHSIINHHASIHNEGDQPKTPENIPSKEPKDGSPVQPSLLSLMKDRRLTLEQVVAIEALTQLSEAPSENSSPSKSEKDEESEQRTASLLNSCKAILYTVRKDLQDPNLQGEPPKLNHCPSLEKQSSCNTVVFNGQTTTLSNSHINSATNQASTKSHEYSKVTNSLSLFIPKSNSSKIDTNKSIAQGIITLDNCSNDLHQLPPRNNEVEYCNQLLDSSKKLDSDDLSCQDATHTQIEEDVATQLTQLASIIKINYIKPEDKKVESTPTSLVTCNVQQKYNQEKGTIQQKPPSSVHNNHGSSLTKQKNPTQKKTKSTPSRDRRKKKPTVVSYQENDRQKWEKLSYMYGTICDIWIASKFQNFGQFCPHDFPTVFGKISSSTKIWKPLAQTRSIMQPKTVFPPLTQIKLQRYPESAEEKVKVEPLDSLSLFHLKTESNGKAFTDKAYNSQVQLTVNANQKAHPLTQPSSPPNQCANVMAGDDQIRFQQVVKEQLMHQRLPTLPGISHETPLPESALTLRNVNVVCSGGITVVSTKSEEEVCSSSFGTSEFSTVDSAQKNFNDYAMNFFTNPTKNLVSITKDSELPTCSCLDRVIQKDKGPYYTHLGAGPSVAAVREIMENRYGQKGNAIRIEIVVYTGKEGKSSHGCPIAKWVLRRSSDEEKVLCLVRQRTGHHCPTAVMVVLIMVWDGIPLPMADRLYTELTENLKSYNGHPTDRRCTLNENRTCTCQGIDPETCGASFSFGCSWSMYFNGCKFGRSPSPRRFRIDPSSPLHEKNLEDNLQSLATRLAPIYKQYAPVAYQNQVEYENVARECRLGSKEGRPFSGVTACLDFCAHPHRDIHNMNNGSTVVCTLTREDNRSLGVIPQDEQLHVLPLYKLSDTDEFGSKEGMEAKIKSGAIEVLAPRRKKRTCFTQPVPRSGKKRAAMMTEVLAHKIRAVEKKPIPRIKRKNNSTTTNNSKPSSLPTLGSNTETVQPEVKSETEPHFILKSSDNTKTYSLMPSAPHPVKEASPGFSWSPKTASATPAPLKNDATASCGFSERSSTPHCTMPSGRLSGANAAAADGPGISQLGEVAPLPTLSAPVMEPLINSEPSTGVTEPLTPHQPNHQPSFLTSPQDLASSPMEEDEQHSEADEPPSDEPLSDDPLSPAEEKLPHIDEYWSDSEHIFLDANIGGVAIAPAHGSVLIECARRELHATTPVEHPNRNHPTRLSLVFYQHKNLNKPQHGFELNKIKFEAKEAKNKKMKASEQKDQAANEGPEQSSEVNELNQIPSHKALTLTHDNVVTVSPYALTHVAGPYNHWV

SEQ ID NO: 2 - protein, 2136 aa, Pan paniscus
  VARIANT 23: Xaa = Any Amino Acid
MSRSRHARPSRLVRKEDVNKKRXNSQLRKTTKGANKNVASVKTLSPGKLKQLIQERDVKKKTEPKPPMPVRSLLTRAGAARMNLDRTEVLFQNPESLTCNGFTMALRSTSLSRRLSQPPLVIAKSKKVPLSKGSEKQHDCDYKILPDLGVKHSENDSVPMQDTQVLPDIETLIGVQNPSLLKGKSQETTQFWSQRVEDSKINIPTHSGPAAEILPGPLEGTRCGEGLFSEETLNDTSGSPKMFAQDTVCAPFPQRATPKVTSQGNPSIQLEELGSRVESLKLSDSYLDPIKSEHDCYPTSSLNKVIPDLNLRNCLALGGSTSPTSVIKFLLAGSKQATLGAKPDHQEAFEATANQQEVSDTTSFLGQAFGAIPHQWELPGADPVHGEALGETPDLPEIPGAIPVQGEVFGTILDQQETLGMSGSVVPDLPVFLPVPPNPIATFNAPSKWPEPQSTVSYGLAVQGAIQILPLGSGHTPQSSSNSEKNSLPPVMAISNVENEKQVHISFLPANTQGFPLAPERGLFHASLGVAQLSQAGPSKSDRGSSHVSVTSTVHVVNTTVVTMPVPMVSTSSSSYTTLLPTLEKKKRKRCGVCEPCQQKTNCGECTYCKNRKNSHQICKKRKCEELKKKPSVVVPLEVIKENKRPQREKKPKVLKADFENKPVNGPKSESMDYSRCGHGEEQKLELNPHTVENVTKNEDSMTGIEVEKWTQNKKSQLTDHVKGDFSANVPEAEKSKNSEVDKKRTKSPKLFVQTVRNGIKHVHCLPAETNVSFKKFNIEEFGKTLENNSYKFLKDTANHNNAMSSVATDMSCDHLKGRSNVLVFQQPGFNCSSIPHSSHSIINHHASIHNEGDQPKTPDNIPSKEPKDGSPVQPSLLSLMKDRRLTLEQVVAIEALTQLSEAPSENSSPSKSEKDEESEQRTASLLNSCKAILYTVRKDLQDPNLQGEPPKLNHCPSLEKQSSCNTVVFNGQTTTLSNSHINSATNQASTKSHEYSKVTNSLSLFIPKSNSSKIDTNKSIAQGIITLDNCSNDLHQLPPRNNEVEYCNQLLDSSKKLDSDDLSCQDATHTQIEEDVATQLTQLASIIKINYIKPEDKKVESTPTSLVTCNVQQKYNQEKGTIQQKPPSSVHNNHGSSLTKQKNPTQKKTKSTPSRDRRKKKPTVVSYQENDRQKWEKLSYMYGTICDIWIASKFQNFGQFCPHDFPTVFGKISSSTKIWKPLAQTRSIMQPKTVFPPLTQIKLQRYPESAEEKVKVEPLDSLSLFHLKTESNGKAFTDKAYNSQVQLTVNANQKAHPLTQPSSPPNQCANVMAGDDQIRFQQVVKEQLMHHRLPTLPGISHETPLPESALTLRNVNVVCSGGITVVSTKSEEEVCSSSFGTSEFSTVDSAQKNFNDYAMNFFTNPTKNLVSITKDSELPTCSCLDRVIQKDKGPYYTHLGAGPSVAAVREIMENRYGQKGNAIRIEIVVYTGKEGKSSHGCPIAKWVLRRSSDEEKVLCLVRQRTGHHCPTAVMVVLIMVWDGIPLPMADRLYTELTENLKSYNGHPTDRRCTLNENRTCTCQGIDPETCGASFSFGCSWSMYFNGCKFGRSPSPRRFRIDPSSPLHEKNLEDNLQSLATRLAPIYKQYAPVAYQNQVEYENVARECRLGSKEGRPFSGVTACLDFCAHPHRDIHNMNNGSTVVCTLTREDNRSLGVIPQDEQLHVLPLYKLSDTDEFGSKEGMEAKIKSGAIEVLAPCRKKRTCFTQPVPRSGKKRAAMMTEVLAHKIRAVEKKPIPRIKRKNNSTTTNNSKASSLPTLGSKTETVQPEVKSETEPHFILKSSDNTKTYSLMPSAPHPVKEASPGFSWSPKTASATPAPLKNDATASCGFSERSSTPHCTMPSGRLSGANAAAADGPGISQLGEVAPLPTLSAPVMEPLINSEPSTGVTEPLTPHQPNHQPSFLTSPQDLASSPMEEDEQHSEADEPPSDEPLSDDPLSPAEEKLPHIDEYWSDSEHIFLDANIGGVAIAPAHGSVLIECARRELHATTPVEHPNRNHPTRLSLVFYQHKNLNKPQHGFELNKIKFEAKEAKNKKMKASEQKDQAANEGPEQSSEVNELNQIPSHKALTLTHDNVVTVSPYALTHVAGPYNHWV

SEQ ID NO: 3 - protein, 2136 aa, Gorilla gorilla gorilla
MSRSRHARPSRLVRKEDVNKKKKNSQLRNTTKGANKNVASVKTLSPGKLKQLIQERDVKKKTEPKPPMPVRSLLTRAGAARMNLDRTEVLFQNPESLTCNGFTMALRSTSLSRRLSQPPLVVAKSKKVPLSKGLEKQHDCDYKILPDLGVKHSENDSVPMQDTQVLPDIETLIGVQNPSLLKGKSQETTQFWSQRVEDSKINIPTHSGPAAEILPGPLEGTRCGEGLFSEETLNDTSGSPKMFAQDTVCAPFPQRATPKVTSQGNPSNQLEELGSRVESLKLSDSYLDPIKSEHDCYPTSSLNKVIPDLNLRNCLALGGSTSPTSVIKFLLAGSKQATLGAKPDHQEAFEATANQQEVSDTTSFLGQAFGAIPHQWELPGADPVHGEALGETPDLPEIPGAIPVQGEVFGTILDQQETLGMSGSVVPDLPVFLPVPPNPIATFNAPSKWPEPQSTVSYGLAVQGAIQILPLGSGHTPQSSSNSEKNSLPPVMAISNVENEKQVHISFLPANTQGFPLASERGLFHASLGVAQLSQAGPSKSDRGSSQVSVTSTVHVVNTTVVTMPVPMVSTSSSSYTTLLPTLEKKKRKRCGVCEPCQQKTNCGECTYCKNRKNSHQICKKRKCEELKKKPSVAVPLEVIKENKRPQREKKPKVLKADFDNKPVNGPKSESMDYSRCGHGEEQKLELNPHTVENVTKNEDSMTGIEVEKWTQNKKSQLTDHVKGDFSANVPEAEKSKNSEVDKKRTKSPKLFVQTIRNGIKHVHCLPAETNVSFKKFNIEEFGKTLENNSYKFLKDTANHNNAMSSVATDMSCDHLKGRSNVLVFQQPGFNCSSIPHSSHSIINHHASIHNEGDQPKTPENIPSKEPKDGSPVQPSLLSLMKDRRLTLEQVVAIEALTQLSEAPSENSSPSKSEKDEESEQRTASLLNSCKAILYTVRKDLQDPNLQGEPPKLNHCPSLEKQSSCNTVVFNGQTTTLSNSHINSATNQASTKSHEYSKVTNSLSLFIPKSNSSKIDTNKSIAQGIITLDNCSNDLHQLPPRNNEVEYCNQLLDSSKKLDSDDLSCQDATHTQIEEDVATQLTQLASIIKINYIKPEDKKVENTPTSLVTCNVQQKYNQEKGTIQQKPPSSVHNNHGSSLTKQKNPTQKKTKSTPSRDRRKKKPTVVSYQENDRQKWEKLSYMYGTICDIWIASKFQNFGQFCPHDFPTVFGKISSSTKIWKPLAQTRSIMQPKTVFPPLTQIKLQRYPESAEEKVKVEPLDSLSLFHLKTESNGKAFTDKAYNSQVQLTVNANQKAHPLTQPSSPPNQCANVMAGDDQIRFQQVVKEQLMHQRLPTLPGISHETPLPESALTLRNVNVVCSGGITVVSTKSEEEVCSSSFGTSEFSTVDSAQKNFNDYAMNFFTNPTKNLVSITKDSELPTCSCLDRVIQKDKGPYYTHLGAGPSVAAVREIMENRYGQKGNAIRIEIVVYTGKEGKSSHGCPIAKWVLRRSSDEEKVLCLVRQRTGHHCPTAVMVVLIMVWDGIPLPMADRLYTELTENLKSYNGHPTDRRCTLNENRTCTCQGIDPETCGASFSFGCSWSMYFNGCKFGRSPSPRRFRIDPSSPLHEKNLEDNLQSLATRLAPIYKQYAPVAYQNQVEYENVARECRLGSKEGRPFSGVTACLDFCAHPHRDIHNMNNGSTVVCTLTREDNRSLGVIPQDEQLHVLPLYKLSDTDEFGSREGMEAKIKSGAIEVLAPCRKKRTCFTQPVPRSGKKRAAMMTEVLAHKIRAVEKKPIPRIKRKNNSTTTNNSKASSLPTLGSKTETVQPEVKSETEPHFILKSSDNTKTYSLMPSAPHPVKEASPGFSWSPKTASATPAPLKNDATASCGFSERSSTPHCTMPSGRLSGANAAAADGPGISQLGEVAPLPTLSAPVMEPLVNSEPSTGVTEPLTPHQPNHQPSFLTSPQDLASSPMEEDEQHSEADEPPSDEPLSDDLLSPAEEKLPHIDEYWSDSEHIFLDANIGGVAIAPAHGSVLIECARRELHATTPVEHPNRNHPTRLSLVFYQHKNLNKPQHGFELNKIKFEAKEAKNKKMKASEQKDQAANEGPEQSSEVNELNQIPSHKALTLTHDNVVTVSPYALTHVAGPYNHWV

SEQ ID NO: 4 - protein, 2132 aa, Mandrillus leucophaeus
MSRSRHARPSRLVRKEDVNKKKKNSQLRKTTKGANKNVASVKTLSPGKLKQLIQERDVKKKTEPKPPMPVRSLLTRAGAARMNSDRTEVLFQNPESLTCNGFTMALRSTSLSRRLSQPPLVIAKSKKVPLSKSLEKQHDCDYKILPDLGVKHSENDSVPMQDTQVLPDIETLISIQNPSLLKGKSQETTQSWSQRVEDSKINIPTHSGPAAEILPGPLEGTCCDEGLFSEETFNDTSGSPKMFAQDTVCAPFPQRATPRVTSQGNPSIQLEELGSRVESLKLSDSYLDPIKSEHNCYPTSSLNKVIPELNLRNCLALGGSTSPTSVIKFLLAGSKQATLGAKPDHQEAFKATANQQEVSDTTSFLGQAFGAIPHQWELPGADPVHGEALRETPDLPEIRGAIPVQGEVFGTILDQQETLGMSGSVVPDLPVFLPVSPNPVATFNAPSKWPEPQGAVSYGLAVQGAIQILPLGSGHTPQSSSISEKNSLPPVMAISNVENEKQVHISFLPANTQGFPLAPERGLFHASLGMAQLSQAGPSKSDRGSSQVSVTSTVHVVNTTVVTIPVPMVSTSSSSYTTLLPTLEKKKRKRCGVCEPCQQKTNCGECTYCKNRKNSHQICKKRKCEELKKKPSVLVPLEVIKENKRPQREKKPKVLKADFDNKPVNGPKSESMDYSRCGHGEEQKLELNPHPVENVTKNEDSMTGIEVEKWTQNKKSHLTDHVKGDFSANVPEAEKSKNSEVDKKQTKSPKLFVQTIRNGIKHVHYLPAETNVSFKKFNIEEFGKTLENSSYKFPKDTANHNNAMSSVATDMSCDHLKGRSNVLVFQQPGFNCNSIPHSSHSNIHRHASIHNEGDQPKTPENIPSKEPKDGSPVQPSLLSLMKDRRLTLEQVVAIEALTQLSEAPSENSSPSKSEKDEESEQRTASLLNSCKAILYTVRKDLQDPNLQGEPQKLHHCPSLEKQSSCNTVVFNGQANSHISSATNQASTKSHEYSKLTNSLSLFIPKSNSPKIDTNKSIAQGIITLDNCSNDLHQLPPRNNEVEYCNQLLDSSKNLDSDDLSCQDATHTQIEEDVATQLTQLASIIKFNYIKSEDKNVESTPTSLVTCNAQQKYNQEKGTIQQKPPSSVHNNHGSSLTKQKNPTQKKTKSTPSRERRKKKPTVVSYQENDQQKWEKLSYMYGTICDIWIASKFQNFGQFCPHDFPTVFGKISSSTKIWKPLAQTRSIMQPKTVFPPLTQIKLQRYPESAEEKMKVEPLDSLSLFHLKTESNGKAFTDKAYNSQVQLTVNANQKAHPLTQPSSPPHQCANVMAGDDQIRFQQVVKEQLMDQRLPTLPGISQETPLPESALTLRNVNVVCSGGITVVSTKSEEEVCSSSVGTSEFSTVDSAQKNFNDYAMNFFTNPTKNLVSVTKDSELPTCNCLDRVIQKDKGPYYTHLGAGPSVAAVREIMENRYGEKGNAIRIEIVVYTGKEGKSSHGCPIAKWVLRRSSDEEKVLCLVRQRTGHHCPTAVMVVLIMVWDGIPLPMADRLYTELTENLKSYNGHPTDRRCTLNENRTCTCQGIDPETCGASFSFGCSWSMYFNGCKFGRSPSPRRFRIDPSSPLHEKNLEDNLQSLATRLAPIYKQYAPVAYQNQVEYENVARECRLGSKEGRPFSGVTACLDFCAHPHRDIHNMNNGSTVVCTLTREDNRSLGVIPQDEQLHVLPLYKLSDTDEFGSKEGMEAKIKSGAIEVLAPRRKKRTCFTQPVPRSGKKRAAMMTEVLAHKIRAVEKKPIPRVKRKNNSTTTNNSKASPLPALGSKTETVQPEVKSETEPHFILKSSDNTKTYSLMPSAPHPVKEASPVFSWSPKTASATPAPLKNDAAASCGFSERSSTPHCTMSSGRLSGANAAAVEGPGISQLGEAAPLPTLSAPVMEPLVNSEPPTGVTEPLTSHQPNHQPSFLTSPQDLDSSPMEEDEQHSEADEPPSDEPLSDDPLSPAEEKLPHIDEYWSDSEHIFLDANIGGVAIAPAHGSVLIECARRELHATTPVEHPNRNHPTRLSLVFYQHKNLNKPQHGFELNKIKFEAKEAKNKKMKASEQKDQAANEGPELSSEVNELNQIPSHKALTLTHDNVVTVSPYALTHVAGPYNHWV

SEQ ID NO: 5 - protein, 1809 aa, Equus caballus
  VARIANT 1021, 1036: Xaa = Any Amino Acid
MSRSRHARPSRLVRREDLNKKKNSQLKKTSKPANKNGASVKTVSPGKLKQLIQERDVKKKPEPKPPVPVRSLLTRAGAARMNLDRTEVLFQNPESLTCNGFTMALRSTSLSRRLSQPPVVIAKPKKVPPPKSLEKQHECDYKVLTDMGVKHSENDFVPIQDPLIPPDLENLISLQNASLIKGESQETTQSWSQRVEDSKINISTHSGPAAEILSGSLEGTPGGEGLFSQETSSDISDSPKMFARGTLCAPLLQRAALKVTSEGNASIQLEDLGSRVESLKLSDSYLDPIKSEHDFCPTSSFNKVIPELDLKNCLSIGGSIYPTSLIKLLLAGSEQETLGAKPGHQEVLKATPDHREVPDTTPVVRQVFNTVPHQWEVPGANLVLGEALGETPDPPEIPGAVPVQGKVFGAILNQQIPGMGGGTASDPPIFLPAPLNPIATYNALPEWPEPQGTVSYGLEVQGTMQILPLGSGHTPLPSSNSEISSIPPVMAISNIENEKQVHISFLPANTQGFTLAPERGLHRASQGIAQLSQAGPSKWEEESSQISKTSMVDINTTVVSRPVSLASTSSSLSYTTLLPTLEKKKRKRCGVCEPCQQKTNCGECTYCKNRKNSHQICKRRKCEELKKKPSVIVSLEVIKENKRPQREKKPKVLKADFDNKPVNGPKSESMEYSRCGHGEEQRLELNPHPLENVTKNEESMTGVEVEKWTQNKKSHLTDHVKGEFKAIVTEAEKLKNSDGDRKKVLLTDLLEPQKLFAQTVRNGIKNVHYLSTETNVSFKKFNIEEFGKAFENNSYKFLKDTANHNNAMSSIATSASCDHLKGRSNVLVFQKPGFNCKSFSDSANFNLNSHASTTNGSEQPKSLENIPSKEPKDGSPVQPSLLSLMKDRRLTLEQVVAIEALTQLSEAPSENSSPSKSEKDEETEQRTASLLNSCKAILYSVRKDLQDTNLQGEPQSLHHCPSLEKQSSCNTVVFNGQNIIQTNAMAGDDQTQFQQDVKDQLMHQRLPTLPGISHEPPLPDXAQILRNVNVVCSGGXTVVSTKSEEDVCSSSVGVSEFSPVDSAQKSFNDYAMTFFTNSTKNLVSTTKDSELPTCNCLDRVIQKDKGPYYTHLGAGPSVAAVREIMENRYGQKGNAVRIEIVVYTGKEGKSSHGCPIAKWVLRRSSDEEKVLCLVRQRTGHHCPTAVMVVLIMVWDGIPLPMADRLYTELTENLKSYNGHPTDRRCTLNENRTCTCQGIDPETCGASFSFGCSWSMYFNGCKFGRSPSPRRFRIDPSSPLHEKNLEDNLQSLATRLAPIYKQYAPVAYQNQVEYEHVARECRLGSKEGRPFSGVTACLDFCAHPHRDIHNMNNGSTVVCTLTREDNRSLGVIPQDEQLHVLPLYKLSDTDEFGSREGMEAKIKSGAIEVLTPRRKKRTRFTQPVPRSGKKRAAMMTEVLAHKIRAVEKKFIPRIKRKNNSMTNSSKTSSLPLLGSKTETLQPEIKSETEPHFIVKDLDNTKTYSLTPSIPHPVKEANLSPGFPWSCNTASATTVPFKDGASDPYGFSERGSNPHCTMPSARHSGANAAAGECTGSAQPGEVVPLPTLSTPVTDSLVYSEPPTGPSEQLTSNQPNQQPPFITSPHELASSLVEEDEQHSEVDEPLSDDPLSDDALSPAEEKLPHIDEYWSDSEHIFLDANIGGVAIAPAHGSVLIECARRELHATTPVENPNRNHPTRLSLVFYQHKNLNKPQHGFELNKIKFEAKEAKNKKIKASEQKDQAANEGPELCPEVNELNQIPSHKALTLTHDNVVTVSPYALTHVAGPYNHWV

SEQ ID NO: 6 - protein, 2137 aa, Canis lupus familiaris
MSRSRHARPSRLVRREDLNRKKSTQLKKTCKAANKNVASVKTVSPGKLKQLIHERDVKKKIEPKPPMPVRSLLTRAGAARMNLDRTEVLFQNPESLTCNGFTMALRSTSLSRRLSQPPVIIAKPKKVSPPKNLEKQHECDYNVVTDMGVKHAENDSVPTQVPLITPEIENLIGVQNASLIKDESQEIAQSWSQRVDDSKINISTHSGPAGESLSGSSEGTRGGEGLFSKETLNDISDSPRMFAQDTLCAPLLQRAALKVTYEGNSSIQLEDLGSRVESLKLSDSYPDPIKSERDCYPTSSFNKIIPELDLRNCLSIDGSIYPTSLIKLLLASSEQETLGAKPDHREILKATADQQEIPDTTPVIGQAFSAVPHRWEIPGANIIHGEALDETLDPPEMPGAVSVQGEVFGAILNQQILGMGGGTASDPPMFLPPLNPIATYNVPPEWPEPQSTVSYGLEVQGAVQILPLGSGHTPQPPSNSEISSVPPIMTISNIENEKQVHISFLPANIQGITLAPERGLLLHASQGITQLSQAGPSTLEGESSQVSMTSVVDINTKVVSRPVSLASTPSSSFTTLLPTLEKKKRKRCGVCEPCQQKTNCGECTYCKNRKNSHQICKKRKCEELKKKPSVIVPLEVIKENKRPQREKKPKVLKADFDNKSVNGLKSESMEYRRSYGGEQRLELNPPPLENVTKNEESMTGIEVEKWTQNKKSHLTDHVKGEFKAIVTEAEKFKNSEDDKKKVLLTDLIEPQKLFAQTIRNGIKNVHYLPTETNVSFKKFNIEEFGKAFENNSYKFLKDTANHNAMSSIATSASCDHLKGRNNVSVFQKPGFNCKSLPDPTTFNLNSHTSTHNESDQPKSLDNIPSKDPKDGSPVQPSLLSLMKDRRLTLEQVVAIEALTQLSEAPSENSSPSKSEKDEETEHRTESLLNSCKAILYSVRKDLQDPNLQGEPESLHHYPSLEKQTSCNTVVFNGQNISKSHHNSAANQAPTKSQECSKATNSITLFIPNSNSSKIDTNKNVAQSRINLESSKNLHPLPPAGDKLGYCNQSLASSKKIDLKDDPSGLNTIHSKIEEDVATQLTQLASIIKFNYIKQEDKKVESTPTSLVAYNVQQKCSQEKATIQQKPPSSVQNNHSSLLTKQKNTTQKKTRATPSRDRRKKKTVVISCQENDQKNQEQLSYEYSKLHDIWIASKFQRFGQFGPHDFPILLGKIPPLTKVWKPLTQTSSVLEHKKLFPPLTQIKFERYYPELAQERNMKVEPLDSLPICQLKTESNGQAFTEKVYSSQVQPTGNVNQKAHPLLQPSSPTNQCANVMTGDDQTQFQRDVQDQLMHQRLPTLPGISHETPLPDPAHILRNVNVVCSGGITVVSTKNEEDVCSSSVGASEFSPVDSAQKSFNDYAMNFFTNPTKNLVSTTKDSDLPTCNCLDRVIQKDKGPYYTHLGAGPSVAAVREIMENRYGQKGNAIRIEIVVYTGKEGKSSHGCPIAKWVLRRGSDEEKVLCLVRQRTGHHCPTAVMVVLIMVWDGIPLPMADRLYTELTENLKSYNGHPTDRRCTLNENRTCTCQGIDPETCGASFSFGCSWSMYFNGCKFGRSPSPRRFRIDPSSPLHEKNLEDNLQSLATRLAPIYKQYAPVAYQNQVEYEHVARECRLGSKEGRPFSGVTACLDFCAHPHRDIHNMNNGSTVVCTLTREDNRSLGVIPQDEQLHVLPLYKLSDTDEFGSREGMEAKIKSGAIEVLTPRRKKRKRFTQPVPRSGKKRAAMMTEVLAHKIRAVEKKFVPRVKRKNNSTSNGKTSSLPLLGNKTEALQLEIKSETEPHFIFKGSDNTKTYSLTPSIPHTLKEANISPGFSWSPKTTSATTAPFKNDVSVSYGFSERSSNPHCTMPSARHSGANAAAGECTGIAQPGEVVALSTLSTPVTESLVYSEPSTGPSEQLPSNHPNQQAPFTTSPHDLTSSLVEEDEQHSDADEPLSDDPLSDDPLSPTEEKLPHIDEYWSDSEHIFLDANIGGVAIAPAHGSVLIECARRELHATTPVEHPNRNHPTRLSLVFYQHKNLNKPQHGFELNKIKFEAKEAKNKKIKASEQKDQAANEVPDLSPEVNELNQIPSHKALTLTHDNIVTVSPYALTHVAGPYNHWV

SEQ ID NO: 7 - protein, 1749 aa, Ovis aries
MGSGTASDPPIFLPAPHNPVATCNALPAWPEPQGTVSSGLEVPDTMQILPSGSGHTPQPSSNSEIILVPPVIPMNNIENEKKVHISLLPAHTQGFTLAPERGLQPAPQGIAQLSLVSPSTLEGRSSQVSATSMVDINTTVVSRPVPLASTSSPSYTTLLPTLEKKKRKRCGVCEPCQQKTNCGECTYCKNRKNSHQICKKRKCEELKKKPSVIVSLEVVKENKRPQREKKPKVLKADFDNKLVNGPKSESMEYSSCAHEEEQRLELNSCPLENVTKNEESMTGIEVENWTQNKKSHLTDHVKGEFSTVKTEVENLKNSEDDRKKILLTDLLEPQKLFAQTVRNGIKNVHYLPTETNLSFKKINIEELGKAFESNPYKFLKDTANHNNVMSTIATSGSCDHLKGKSNVLVIQKPGFNCKSFPDPVNCNSNSHTSIHNESDQPKSLEIIANRDLKEGSTLQPSLLSLMKDRRLTLEQVVAIEALTQLSEAPSENSSPSKSEKDEETEQRTASLLNSCKAILYSVRKDLQDPNLKGEPQSLHHCPSLEKQSSCNAVVFNGQNIISKSHNSSPSDQASTKAQESSTVTNSISLLIPNSNSSKTDTNKNIAQGRITLDSSRSLQPLTTITSKSEYCNQSLDNSIKLDSKDDSSCQDSVHSKIEEDVAAQLTQLASMIKFNYVKPEDKKVESTPISLVAYNVQQKYNQEMGTPPQKPPSNVQNNQGSSVTKQKNTIQKKTKATPSRDRRKKKHMVISCQENDQKKQEQLSYEYSKLHDIWIASKFQRFGQFGPHDFPILLGKIPPLTKVWKPLTQTSSALEHKKLFPPLAQIKFERYYPELAQEKMKVEPLDSIPIIQLKTESNGQAFTENAYTQVQPTVNVNQKAHPLLQPASPTNQCANVLDGSDQRQFQEDVKDQLMHQRLPTSPGISHETPLPDPAQILRNLNVVCSGGITVVSTKNEEDVCSSSVGTSEFPPINSAQKTFNDYAMNFFTNSTKTLVSTTKDSELPTCNCLDRVIQKDKGPYYTHLGAGPSVAAVREIMENRYGQKGNAIRIEIVVYTGKEGKSSNGCPVAKWVLRRSSDEEKVLCLVRQRTGHHCPTAVMVVLIMVWDGIPLPMADKLYSQLTESLKSYNGHPTDRRCTLNENRTCTCQGIDPETCGASFSFGCSWSMYFNGCKFGRSPSPRRFRIDPSSPLHHYYERITKGRNPERRYMKPEPICPEHEAMEKNLEDNLQSLATELAPIYKQYAPAAYQNQVALEHIARECRLGKKEGRPFSGVTACLDFCAHPHRDIHNMNNGSTVVCTLTREDNRSFGVIPQDEQLHVLPLYKLSDTDEFGSREGMEAKIKSGAIMVLAPRQKKRMRFTQPVPRSGKKRAAMMTEVLAHKIRAVEKKFIPRIKRKNNSMTNNSKASSLPLLGNKTETVQPEIKSETEPHLIFKGSDNTKSYSPAPFIPHPVKEENLAPAFSWSSKTALVTTAPFKNDASLSYGFSERGSNPHCIMPSARHSGANVAAGECSEIAQPGEMVPLPTLSTPMTNSLGYSEPPIGPSEQLTSNQPNQQPPFITSPHELASSLVEEDEQPSEADEPPSDDPLSDDPLSPAEEKLPHIVEYWSDSEHIFLDANVGGVAIAPSHGSVLIECARRELHATTPVDHPNRNHPTRLSLVFYQHKNLNKPQHGFELNKIKFEAKEAKNKKTKASEQKDQAANEGIELTEVNEFSQIPSHKALTLTHDNVVTVSPYALTHVAGPYNHWV

SEQ ID NO: 8 - protein, 718 aa, Homo sapiens
LPTCSCLDRVIQKDKGPYYTHLGAGPSVAAVREIMENRYGQKGNAIRIEIVVYTGKEGKSSHGCPIAKWVLRRSSDEEKVLCLVRQRTGHHCPTAVMVVLIMVWDGIPLPMADRLYTELTENLKSYNGHPTDRRCTLNENRTCTCQGIDPETCGASFSFGCSWSMYFNGCKFGRSPSPRRFRIDPSSPLHEKNLEDNLQSLATRLAPIYKQYAPVAYQNQVEYENVARECRLGSKEGRPFSGVTACLDFCAHPHRDIHNMNNGSTVVCTLTREDNRSLGVIPQDEQLHVLPLYKLSDTDEFGSKEGMEAKIKSGAIEVLAPRRKKRTCFTQPVPRSGKKRAAMMTEVLAHKIRAVEKKPIPRIKRKNNSTTTNNSKPSSLPTLGSNTETVQPEVKSETEPHFILKSSDNTKTYSLMPSAPHPVKEASPGFSWSPKTASATPAPLKNDATASCGFSERSSTPHCTMPSGRLSGANAAAADGPGISQLGEVAPLPTLSAPVMEPLINSEPSTGVTEPLTPHQPNHQPSFLTSPQDLASSPMEEDEQHSEADEPPSDEPLSDDPLSPAEEKLPHIDEYWSDSEHIFLDANIGGVAIAPAHGSVLIECARRELHATTPVEHPNRNHPTRLSLVFYQHKNLNKPQHGFELNKIKFEAKEAKNKKMKASEQKDQAANEGPEQSSEVNELNQIPSHKALTLTHDNVVTVSPYALTHVAGPYNHWV

SEQ ID NO: 9 - protein, 718 aa, Pan paniscus
LPTCSCLDRVIQKDKGPYYTHLGAGPSVAAVREIMENRYGQKGNAIRIEIVVYTGKEGKSSHGCPIAKWVLRRSSDEEKVLCLVRQRTGHHCPTAVMVVLIMVWDGIPLPMADRLYTELTENLKSYNGHPTDRRCTLNENRTCTCQGIDPETCGASFSFGCSWSMYFNGCKFGRSPSPRRFRIDPSSPLHEKNLEDNLQSLATRLAPIYKQYAPVAYQNQVEYENVARECRLGSKEGRPFSGVTACLDFCAHPHRDIHNMNNGSTVVCTLTREDNRSLGVIPQDEQLHVLPLYKLSDTDEFGSKEGMEAKIKSGAIEVLAPCRKKRTCFTQPVPRSGKKRAAMMTEVLAHKIRAVEKKPIPRIKRKNNSTTTNNSKASSLPTLGSKTETVQPEVKSETEPHFILKSSDNTKTYSLMPSAPHPVKEASPGFSWSPKTASATPAPLKNDATASCGFSERSSTPHCTMPSGRLSGANAAAADGPGISQLGEVAPLPTLSAPVMEPLINSEPSTGVTEPLTPHQPNHQPSFLTSPQDLASSPMEEDEQHSEADEPPSDEPLSDDPLSPAEEKLPHIDEYWSDSEHIFLDANIGGVAIAPAHGSVLIECARRELHATTPVEHPNRNHPTRLSLVFYQHKNLNKPQHGFELNKIKFEAKEAKNKKMKASEQKDQAANEGPEQSSEVNELNQIPSHKALTLTHDNVVTVSPYALTHVAGPYNHWV

SEQ ID NO: 10 - protein, 718 aa, Gorilla gorilla gorilla
LPTCSCLDRVIQKDKGPYYTHLGAGPSVAAVREIMENRYGQKGNAIRIEIVVYTGKEGKSSHGCPIAKWVLRRSSDEEKVLCLVRQRTGHHCPTAVMVVLIMVWDGIPLPMADRLYTELTENLKSYNGHPTDRRCTLNENRTCTCQGIDPETCGASFSFGCSWSMYFNGCKFGRSPSPRRFRIDPSSPLHEKNLEDNLQSLATRLAPIYKQYAPVAYQNQVEYENVARECRLGSKEGRPFSGVTACLDFCAHPHRDIHNMNNGSTVVCTLTREDNRSLGVIPQDEQLHVLPLYKLSDTDEFGSREGMEAKIKSGAIEVLAPCRKKRTCFTQPVPRSGKKRAAMMTEVLAHKIRAVEKKPIPRIKRKNNSTTTNNSKASSLPTLGSKTETVQPEVKSETEPHFILKSSDNTKTYSLMPSAPHPVKEASPGFSWSPKTASATPAPLKNDATASCGFSERSSTPHCTMPSGRLSGANAAAADGPGISQLGEVAPLPTLSAPVMEPLVNSEPSTGVTEPLTPHQPNHQPSFLTSPQDLASSPMEEDEQHSEADEPPSDEPLSDDLLSPAEEKLPHIDEYWSDSEHIFLDANIGGVAIAPAHGSVLIECARRELHATTPVEHPNRNHPTRLSLVFYQHKNLNKPQHGFELNKIKFEAKEAKNKKMKASEQKDQAANEGPEQSSEVNELNQIPSHKALTLTHDNVVTVSPYALTHVAGPYNHWV

SEQ ID NO: 11 - protein, 718 aa, Mandrillus leucophaeus
LPTCNCLDRVIQKDKGPYYTHLGAGPSVAAVREIMENRYGEKGNAIRIEIVVYTGKEGKSSHGCPIAKWVLRRSSDEEKVLCLVRQRTGHHCPTAVMVVLIMVWDGIPLPMADRLYTELTENLKSYNGHPTDRRCTLNENRTCTCQGIDPETCGASFSFGCSWSMYFNGCKFGRSPSPRRFRIDPSSPLHEKNLEDNLQSLATRLAPIYKQYAPVAYQNQVEYENVARECRLGSKEGRPFSGVTACLDFCAHPHRDIHNMNNGSTVVCTLTREDNRSLGVIPQDEQLHVLPLYKLSDTDEFGSKEGMEAKIKSGAIEVLAPRRKKRTCFTQPVPRSGKKRAAMMTEVLAHKIRAVEKKPIPRVKRKNNSTTTNNSKASPLPALGSKTETVQPEVKSETEPHFILKSSDNTKTYSLMPSAPHPVKEASPVFSWSPKTASATPAPLKNDAAASCGFSERSSTPHCTMSSGRLSGANAAAVEGPGISQLGEAAPLPTLSAPVMEPLVNSEPPTGVTEPLTSHQPNHQPSFLTSPQDLDSSPMEEDEQHSEADEPPSDEPLSDDPLSPAEEKLPHIDEYWSDSEHIFLDANIGGVAIAPAHGSVLIECARRELHATTPVEHPNRNHPTRLSLVFYQHKNLNKPQHGFELNKIKFEAKEAKNKKMKASEQKDQAANEGPELSSEVNELNQIPSHKALTLTHDNVVTVSPYALTHVAGPYNHWV

SEQ ID NO: 12 - protein, 719 aa, Equus caballus
LPTCNCLDRVIQKDKGPYYTHLGAGPSVAAVREIMENRYGQKGNAVRIEIVVYTGKEGKSSHGCPIAKWVLRRSSDEEKVLCLVRQRTGHHCPTAVMVVLIMVWDGIPLPMADRLYTELTENLKSYNGHPTDRRCTLNENRTCTCQGIDPETCGASFSFGCSWSMYFNGCKFGRSPSPRRFRIDPSSPLHEKNLEDNLQSLATRLAPIYKQYAPVAYQNQVEYEHVARECRLGSKEGRPFSGVTACLDFCAHPHRDIHNMNNGSTVVCTLTREDNRSLGVIPQDEQLHVLPLYKLSDTDEFGSREGMEAKIKSGAIEVLTPRRKKRTRFTQPVPRSGKKRAAMMTEVLAHKIRAVEKKFIPRIKRKNNSMTNSSKTSSLPLLGSKTETLQPEIKSETEPHFIVKDLDNTKTYSLTPSIPHPVKEANLSPGFPWSCNTASATTVPFKDGASDPYGFSERGSNPHCTMPSARHSGANAAAGECTGSAQPGEVVPLPTLSTPVTDSLVYSEPPTGPSEQLTSNQPNQQPPFITSPHELASSLVEEDEQHSEVDEPLSDDPLSDDALSPAEEKLPHIDEYWSDSEHIFLDANIGGVAIAPAHGSVLIECARRELHATTPVENPNRNHPTRLSLVFYQHKNLNKPQHGFELNKIKFEAKEAKNKKIKASEQKDQAANEGPELCPEVNELNQIPSHKALTLTHDNVVTVSPYALTHVAGPYNHWV

SEQ ID NO: 13 - protein, 718 aa, Canis lupus familiaris
LPTCNCLDRVIQKDKGPYYTHLGAGPSVAAVREIMENRYGQKGNAIRIEIVVYTGKEGKSSHGCPIAKWVLRRGSDEEKVLCLVRQRTGHHCPTAVMVVLIMVWDGIPLPMADRLYTELTENLKSYNGHPTDRRCTLNENRTCTCQGIDPETCGASFSFGCSWSMYFNGCKFGRSPSPRRFRIDPSSPLHEKNLEDNLQSLATRLAPIYKQYAPVAYQNQVEYEHVARECRLGSKEGRPFSGVTACLDFCAHPHRDIHNMNNGSTVVCTLTREDNRSLGVIPQDEQLHVLPLYKLSDTDEFGSREGMEAKIKSGAIEVLTPRRKKRKRFTQPVPRSGKKRAAMMTEVLAHKIRAVEKKFVPRVKRKNNSTSNGKTSSLPLLGNKTEALQLEIKSETEPHFIFKGSDNTKTYSLTPSIPHTLKEANISPGFSWSPKTTSATTAPFKNDVSVSYGFSERSSNPHCTMPSARHSGANAAAGECTGIAQPGEVVALSTLSTPVTESLVYSEPSTGPSEQLPSNHPNQQAPFTTSPHDLTSSLVEEDEQHSDADEPLSDDPLSDDPLSPTEEKLPHIDEYWSDSEHIFLDANIGGVAIAPAHGSVLIECARRELHATTPVEHPNRNHPTRLSLVFYQHKNLNKPQHGFELNKIKFEAKEAKNKKIKASEQKDQAANEVPDLSPEVNELNQIPSHKALTLTHDNIVTVSPYALTHVAGPYNHWV

SEQ ID NO: 14 - protein, 747 aa, Ovis aries
LPTCNCLDRVIQKDKGPYYTHLGAGPSVAAVREIMENRYGQKGNAIRIEIVVYTGKEGKSSNGCPVAKWVLRRSSDEEKVLCLVRQRTGHHCPTAVMVVLIMVWDGIPLPMADKLYSQLTESLKSYNGHPTDRRCTLNENRTCTCQGIDPETCGASFSFGCSWSMYFNGCKFGRSPSPRRFRIDPSSPLHHYYERITKGRNPERRYMKPEPICPEHEAMEKNLEDNLQSLATELAPIYKQYAPAAYQNQVALEHIARECRLGKKEGRPFSGVTACLDFCAHPHRDIHNMNNGSTVVCTLTREDNRSFGVIPQDEQLHVLPLYKLSDTDEFGSREGMEAKIKSGAIMVLAPRQKKRMRFTQPVPRSGKKRAAMMTEVLAHKIRAVEKKFIPRIKRKNNSMTNNSKASSLPLLGNKTETVQPEIKSETEPHLIFKGSDNTKSYSPAPFIPHPVKEENLAPAFSWSSKTALVTTAPFKNDASLSYGFSERGSNPHCIMPSARHSGANVAAGECSEIAQPGEMVPLPTLSTPMTNSLGYSEPPIGPSEQLTSNQPNQQPPFITSPHELASSLVEEDEQPSEADEPPSDDPLSDDPLSPAEEKLPHIVEYWSDSEHIFLDANVGGVAIAPSHGSVLIECARRELHATTPVDHPNRNHPTRLSLVFYQHKNLNKPQHGFELNKIKFEAKEAKNKKTKASEQKDQAANEGIELTEVNEFSQIPSHKALTLTHDNVVTVSPYALTHVAGPYNHWV

SEQ ID NO: 15 - protein, 1390 aa, Artificial Sequence
  Synthetic Construct
MPKKKRKVGRGMDKKYSIGLAIGTNSVGWAVITDEYKVPSKKFKVLGNTDRHSIKKNLIGALLFDSGETAEATRLKRTARRRYTRRKNRICYLQEIFSNEMAKVDDSFFHRLEESFLVEEDKKHERHPIFGNIVDEVAYHEKYPTIYHLRKKLVDSTDKADLRLIYLALAHMIKFRGHFLIEGDLNPDNSDVDKLFIQLVQTYNQLFEENPINASGVDAKAILSARLSKSRRLENLIAQLPGEKKNGLFGNLIALSLGLTPNFKSNFDLAEDAKLQLSKDTYDDDLDNLLAQIGDQYADLFLAAKNLSDAILLSDILRVNTEITKAPLSASMIKRYDEHHQDLTLLKALVRQQLPEKYKEIFFDQSKNGYAGYIDGGASQEEFYKFIKPILEKMDGTEELLVKLNREDLLRKQRTFDNGSIPHQIHLGELHAILRRQEDFYPFLKDNREKIEKILTFRIPYYVGPLARGNSRFAWMTRKSEETITPWNFEEVVDKGASAQSFIERMTNFDKNLPNEKVLPKHSLLYEYFTVYNELTKVKYVTEGMRKPAFLSGEQKKAIVDLLFKTNRKVTVKQLKEDYFKKIECFDSVEISGVEDRFNASLGTYHDLLKIIKDKDFLDNEENEDILEDIVLTLTLFEDREMIEERLKTYAHLFDDKVMKQLKRRRYTGWGRLSRKLINGIRDKQSGKTILDFLKSDGFANRNFMQLIHDDSLTFKEDIQKAQVSGQGDSLHEHIANLAGSPAIKKGILQTVKVVDELVKVMGRHKPENIVIEMARENQTTQKGQKNSRERMKRIEEGIKELGSQILKEHPVENTQLQNEKLYLYYLQNGRDMYVDQELDINRLSDYDVAAIVPQSFLKDDSIDNKVLTRSDKARGKSDNVPSEEVVKKMKNYWRQLLNAKLITQRKFDNLTKAERGGLSELDKAGFIKRQLVETRQITKHVAQILDSRMNTKYDENDKLIREVKVITLKSKLVSDFRKDFQFYKVREINNYHHAHDAYLNAVVGTALIKKYPKLESEFVYGDYKVYDVRKMIAKSEQEIGKATAKYFFYSNIMNFFKTEITLANGEIRKRPLIETNGETGEIVWDKGRDFATVRKVLSMPQVNIVKKTEVQTGGFSKESILPKRNSDKLIARKKDWDPKKYGGFDSPTVAYSVLVVAKVEKGKSKKLKSVKELLGITIMERSSFEKNPIDFLEAKGYKEVKKDLIIKLPKYSLFELENGRKRMLASAGELQKGNELALPSKYVNFLYLASHYEKLKGSPEDNEQKQLFVEQHKHYLDEIIEQISEFSKRVILADANLDKVLSAYNKHRDKPIREQAENIIHLFTLTNLGAPAAFKYFDTTIDRKRYTSTKEVLDATLIHQSITGLYETRIDLSQLGGDSRADPKKKRKV

SEQ ID NO: 16 - protein, 1139 aa, Artificial Sequence
  Synthetic Construct
MPKKKRKVSDLVLGLAIGIGSVGVGILNKVTGEIIHKNSRIFPAAQAENNLVRRTNRQGRRLARRKKHRRVRLNRLFEESGLITDFTKISINLNPYQLRVKGLTDELSNEELFIALKNMVKHRGISYLDDASDDGNSSVGDYAQIVKENSKQLETKTPGQIQLERYQTYGQLRGDFTVEKDGKKHRLINVFPTSAYRSEALRILQTQQEFNPQITDEFINRYLEILTGKRKYYHGPGNEKSRTDYGRYRTSGETLDNIFGILIGKCTFYPDEFRAAKASYTAQEFNLLNDLNNLTVPTETKKLSKEQKNQIINYVKNEKAMGPAKLFKYIAKLLSCDVADIKGYRIDKSGKAEIHTFEAYRKMKTLETLDIEQMDRETLDKLAYVLTLNTEREGIQEALEHEFADGSFSQKQVDELVQFRKANSSIFGKGWHNFSVKLMMELIPELYETSEEQMTILTRLGKQKTTSSSNKTKYIDEKLLTEEIYNPVVAKSVRQAIKIVNAAIKEYGDFDNIVIEMARETNEDDEKKAIQKIQKANKDEKDAAMLKAANQYNGKAELPHSVFHGHKQLATKIRLWHQQGERCLYTGKTISIHDLINNSNQFEVAAILPLSITFDDSLANKVLVYATAAQEKGQRTPYQALDSMDDAWSFRELKAFVRESKTLSNKKKEYLLTEEDISKFDVRKKFIERNLVDTRYASRVVLNALQEHFRAHKIDTKVSVVRGQFTSQLRRHWGIEKTRDTYHHHAVDALIIAASSQLNLWKKQKNTLVSYSEDQLLDIETGELISDDEYKESVFKAPYQHFVDTLKSKEFEDSILFSYQVDSKFNRKISDATIYATRQAKVGKDKADETYVLGKIKDIYTQDGYDAFMKIYKKDKSKFLMYRHDPQTFEKVIEPILENYPNKQINDKGKEVPCNPFLKYKEEHGYIRKYSKKGNGPEIKSLKYYDSKLGNHIDITPKDSNNKVVLQSVSPWRADVYFNKTTGKYEILGLKYADLQFDKGTGTYKISQEKYNDIKKKEGVDSDSEFKFTLYKNDLLLVKDTETKEQQLFRFLSRTMPKQKHYVELKPYDKQKFEGGEALIKVLGNVANSGQCKKGLGKSNISIYKVRTDVLGNQHIIKNEGDKPKLDFSRADPKKKRKV

SEQ ID NO: 17 - protein, 1100 aa, Artificial Sequence
  Synthetic Construct
MPKKKRKVAAFKPNPINYILGLAIGIASVGWAMVEIDEDENPICLIDLGVRVFERAEVPKTGDSLAMARRLARSVRRLTRRRAHRLLRARRLLKREGVLQAADFDENGLIKSLPNTPWQLRAAALDRKLTPLEWSAVLLHLIKHRGYLSQRKNEGETADKELGALLKGVADNAHALQTGDFRTPAELALNKFEKESGHIRNQRGDYSHTFSRKDLQAELILLFEKQKEFGNPHVSGGLKEGIETLLMTQRPALSGDAVQKMLGHCTFEPAEPKAAKNTYTAERFIWLTKLNNLRILEQGSERPLTDTERATLMDEPYRKSKLTYAQARKLLGLEDTAFFKGLRYGKDNAEASTLMEMKAYHAISRALEKEGLKDKKSPLNLSPELQDEIGTAFSLFKTDEDITGRLKDRIQPEILEALLKHISFDKFVQISLKALRRIVPLMEQGKRYDEACAEIYGDHYGKKNTEEKIYLPPIPADEIRNPVVLRALSQARKVINGVVRRYGSPARIHIETAREVGKSFKDRKEIEKRQEENRKDREKAAAKFREYFPNFVGEPKSKDILKLRLYEQQHGKCLYSGKEINLGRLNEKGYVEIAAALPFSRTWDDSFNNKVLVLGSEAQNKGNQTPYEYFNGKDNSREWQEFKARVETSRFPRSKKQRILLQKFDEDGFKERNLNDTRYVNRFLCQFVADRMRLTGKGKKRVFASNGQITNLLRGFWGLRKVRAENDRHHALDAVVVACSTVAMQQKITRFVRYKEMNAFDGKTIDKETGEVLHQKTHFPQPWEFFAQEVMIRVFGKPDGKPEFEEADTPEKLRTLLAEKLSSRPEAVHEYVTPLFVSRAPNRKMSGQGHMETVKSAKRLDEGVSVLRVPLTQLKLKDLEKMVNREREPKLYEALKARLEAHKDDPAKAFAEPFYKYDKAGNRTQQVKAVRVEQVQKTGVWVRNHNGIADNATMVRVDVFEKGDKYYLVPIYSWQVAKGILPDRAVVQGKDEEDWQLIDDSFNFKFSLHPNDLVEVITKKARMFGYFASCHRGTGNINIRIHDLDHKIGKNGILEGIGVKTALSFQKYQIDELGKEIRPCRLKKRPPVRSRADPKKKRKV

SEQ ID NO: 18 - DNA, 102 bp, Artificial Sequence
  Synthetic Construct
  misc_feature 1, 2, 3, 4, 5, 6, 7, 8, 9, 10, 11, 12, 13, 14, 15, 16, 17,18, 19, 20: n = A,T,C or G
nnnnnnnnnnnnnnnnnnnngttttagagctagaaatagcaagttaaaataaggctagtccgttatcaacttgaaaaagtggcaccgagtcggtgctttttt

SEQ ID NO: 19 - DNA, 110 bp, Artificial Sequence
  Synthetic Construct
  misc_feature 1, 2, 3, 4, 5, 6, 7, 8, 9, 10, 11, 12, 13, 14, 15, 16, 17,18, 19, 20: n = A,T,C or G
nnnnnnnnnnnnnnnnnnnngtttttgtactctcagaaatgcagaagctacaaagataaggcttcatgccgaaatcaacaccctgtcattttatggcagggtgttttttt

SEQ ID NO: 20 - DNA, 128 bp, Artificial Sequence
  Synthetic Construct
  misc_feature 1, 2, 3, 4, 5, 6, 7, 8, 9, 10, 11, 12, 13, 14, 15, 16, 17,18, 19, 20: n = A,T,C or G
nnnnnnnnnnnnnnnnnnnngttgtagctccctttctcgaaagagaaccgttgctacaataaggccgtctgaaaagatgtgccgcaacgctctgccccttaaagcttctgctttaacgggcttttttt

SEQ ID NO: 21 - DNA, 5787 bp, Artificial Sequence
  Synthetic Construct
agtctagctcaacagagcttttaacccaaattggtacaatagaatacaactttagatcataattctcaaaagaaagagattccttagctattctatctgccactccatttccttctcggcttgtatgcacaagcataaaatcctcaaacttgctaagtagatactttatgtcttggataattggattgagacttgacaagcataactttcatgtaaccaaagacacaagttgctgagaatccacctcaaaaatgatcttcctataattgaatcgggataatgacagcacagcccatctaagagcctccacttctacttccagcacgcttcttacttttaccacagctcttgcacctaaccataacaccttccctgtatgatcgcgaagcacccaccctaagccacattttaatccttctgttggccatgccccatcaaagttgcacttaacccaagattgtggtggagcttcccatgtttctcgtctgtcccgacggtgttgtggttggtgctttccttacattctgagcctctttccttctaatccactcatctgcatcttcttgtgtccttactaatacctcattggttccaaattccctccctttaagcaccagctcgtttctgttcttccacagcctcccaagtatccaagggactaaagcctccacattcttcagatcaggatattcttgtttaagatgttgaactctatggaggtttgtatgaactgatgatctaggaccggataagttcccttcttcatagcgaacttattcaaagaatgttttgtgtatcattcttgttacattgttattaatgaaaaaatattattggtcattggactgaacacgagtgttaaatatggaccaggccccaaataagatccattgatatatgaattaaataacaagaataaatcgagtcaccaaaccacttgccttttttaacgagacttgttcaccaacttgatacaaaagtcattatcctatgcaaatcaataatcatacaaaaatatccaataacactaaaaaattaaaagaaatggataatttcacaatatgttatacgataaagaagttacttttccaagaaattcactgattttataagcccacttgcattagataaatggcaaaaaaaaacaaaaaggaaaagaaataaagcacgaagaattctagaaaatacgaaatacgcttcaatgcagtgggacccacggttcaattattgccaattttcagctccaccgtatatttaaaaaataaaacgataatgctaaaaaaatataaatcgtaacgatcgttaaatctcaacggctggatcttatgacgaccgttagaaattgtggttgtcgacgagtcagtaataaacggcgtcaaagtggttgcagccggcacacacgagtcgtgtttatcaactcaaagcacaaatacttttcctcaacctaaaaataaggcaattagccaaaaacaactttgcgtgtaaacaacgctcaatacacgtgtcattttattattagctattgcttcaccgccttagctttctcgtgacctagtcgtcctcgtcttttcttcttcttcttctataaaacaatacccaaagagctcttcttcttcacaattcagatttcaatttctcaaaatcttaaaaactttctctcaattctctctaccgtgatcaaggtaaatttctgtgttccttattctctcaaaatcttcgattttgttttcgttcgatcccaatttcgtatatgttctttggtttagattctgttaatcttagatcgaagacgattttctgggtttgatcgttagatatcatcttaattctcgattagggtttcatagatatcatccgatttgttcaaataatttgagttttgtcgaataattactcttcgatttgtgatttctatctagatctggtgttagtttctagtttgtgcgatcgaatttgtcgattaatctgagtttttctgattaacagacgcgtccatggttgggtaccaacaaatggctggtggacttaacgatatcttcgaagctcagaagattgaatggcatgaggatactggtggatctagcatccccggacttgaggttcttttccaaggacctctcgagccttataaatgccctgagtgtggaaaatctttctctcaatctggagatcttaggaggcaccaaaggacccataccggtgaaaaaccttataaatgccctgagtgtggaaaatcattcagtaggagtgatcatcttaccacccatcagaggacccatactggtgaaaaaccttataaatgccctgagtgtggaaaatcattctcacaatcttcatctcttgttaggcatcagaggactcataccggagaaaaaccttataaatgccctgagtgtggaaaatcattctcaacatctggaaaccttgttaggcaccaaaggacccatactggtgaaaaaccttataaatgccctgagtgtggaaaatcattctctcagagagcaaaccttagggctcatcaaaggacacacactggagaaaaaccttataaatgccctgagtgtggaaaatctttctctaggagtgataagctcaccgagcatcaaaggactcacaccggactcgaggactacaaagacgatgacgacaaagactacaaagacgatgacgacaaagactacaaagacgatgacgacaaaaagcttgatatcgccatggggggcgcgccaagctatcaaacaagtttgtacaaaaaagcaggctccgcggccgcccccttcaccatgggatccctgcccacctgcagctgtcttgatcgagttatacaaaaagacaaaggcccatattatacacaccttggggcaggaccaagtgttgctgctgtcagggaaatcatggagaataggtatggtcaaaaaggaaacgcaataaggatagaaatagtagtgtacaccggtaaagaagggaaaagctctcatgggtgtccaattgctaagtgggttttaagaagaagcagtgatgaagaaaaagttctttgtttggtccggcagcgtacaggccaccactgtccaactgctgtgatggtggtgctcatcatggtgtgggatggcatccctcttccaatggccgaccggctatacacagagctcacagagaatctaaagtcatacaatgggcaccctaccgacagaagatgcaccctcaatgaaaatcgtacctgtacatgtcaaggaattgatccagagacttgtggagcttcattctcttttggctgttcatggagtatgtactttaatggctgtaagtttggtagaagcccaagccccagaagatttagaattgatccaagctctcccttacatgaaaaaaaccttgaagataacttacagagtttggctacacgattagctccaatttataagcagtatgctccagtagcttaccaaaatcaggtggaatatgaaaatgttgcccgagaatgtcggcttggcagcaaggaaggtcgacccttctctggggtcactgcttgcctggacttctgtgctcatccccacagggacattcacaacatgaataatggaagcactgtggtttgtaccttaactcgagaagataaccgctctttgggtgttattcctcaagatgagcagctccatgtgctacctctttataagctttcagacacagatgagtttggctccaaggaaggaatggaagccaagatcaaatctggggccatcgaggtcctggcaccccgccgcaaaaaaagaacgtgtttcactcagcctgttccccgttctggaaagaagagggctgcgatgatgacagaggttcttgcacataagataagggcagtggaaaagaaacctattccccgaatcaagcggaagaataactcaacaacaacaaacaacagtaagccttcgtcactgccaaccttagggagtaacactgagaccgtgcaacctgaagtaaaaagtgaaaccgaaccccattttatcttaaaaagttcagacaacactaaaacttattcgctgatgccatccgctcctcacccagtgaaagaggcatctccaggcttctcctggtccccgaagactgcttcagccacaccagctccactgaagaatgacgcaacagcctcatgcgggttttcagaaagaagcagcactccccactgtacgatgccttcgggaagactcagtggtgccaatgctgcagctgctgatggccctggcatttcacagcttggcgaagtggctcctctccccaccctgtctgctcctgtgatggagcccctcattaattctgagccttccactggtgtgactgagccgctaacgcctcatcagccaaaccaccagccctccttcctcacctctcctcaagaccttgcctcttctccaatggaagaagatgagcagcattctgaagcagatgagcctccatcagacgaacccctatctgatgaccccctgtcacctgctgaggagaaattgccccacattgatgagtattggtcagacagtgagcacatctttttggatgcaaatattggtggggtggccatcgcacctgctcacggctcggttttgattgagtgtgcccggcgagagctgcacgctaccactcctgttgagcaccccaaccgtaatcatccaacccgcctctcccttgtcttttaccagcacaaaaacctaaataagccccaacatggttttgaactaaacaagattaagtttgaggctaaagaagctaagaataagaaaatgaaggcctcagagcaaaaagaccaggcagctaatgaaggtccagaacagtcctctgaagtaaatgaattgaaccaaattccttctcataaagcattaacattaacccatgacaatgttgtcaccgtgtccccttatgctctcacacacgttgcggggccctataaccattgggtctgaaagggtgggcgcgccgacccagctttcttgtacaaagtggttcgataattccttaattaactagttctagagcggccgccaccgcggtggagctcctaggtgagtctagagagttaattaagacccgggactagtccctagagtcctgctttaatgagatatgcgagacgcctatgatcgcatgatatttgctttcaattctgttgtgcacgttgtaaaaaacctgagcatgtgtagctcagatccttaccgccggtttcggttcattctaatgaatatatcacccgttactatcgtatttttatgaataatattctccgttcaatttactgattgtaccctactacttatatgtacaatattaaaatgaaaacaatatattgtgctgaataggtttatagcgacatctatgatagagcgccacaataacaaacaattgcgttttattattacaaatccaattttaaaaaaagcggcagaaccggtcaaacctaaaagactgattacataaatcttattcaaatttcaaaagtgccccaggggctagtatctacgacacaccgagcggcgaactaataacgctcactgaagggaactccggttccccgccggcgcgcatgggtgagattccttgaagttgagtattggccgtccgctctaccgaaagttacgggcaccattcaacccggtccagcacggcggccgggtaaccgacttgctgccccgagaattatgcagcatttttttggtgtatgtgggccccaaatgaagtgcaggtcaaaccttgacagtgacgacaaatcgttgggcgggtccagggcgaattttgcgacgagct

SEQ ID NO: 22 - DNA, 1992 bp, Artificial Sequence
  Synthetic Construct
agtctagctcaacagagcttttaacccaaattggtacaatagaatacaactttagatcataattctcaaaagaaagagattccttagctattctatctgccactccatttccttctcggcttgtatgcacaagcataaaatcctcaaacttgctaagtagatactttatgtcttggataattggattgagacttgacaagcataactttcatgtaaccaaagacacaagttgctgagaatccacctcaaaaatgatcttcctataattgaatcgggataatgacagcacagcccatctaagagcctccacttctacttccagcacgcttcttacttttaccacagctcttgcacctaaccataacaccttccctgtatgatcgcgaagcacccaccctaagccacattttaatccttctgttggccatgccccatcaaagttgcacttaacccaagattgtggtggagcttcccatgtttctcgtctgtcccgacggtgttgtggttggtgctttccttacattctgagcctctttccttctaatccactcatctgcatcttcttgtgtccttactaatacctcattggttccaaattccctccctttaagcaccagctcgtttctgttcttccacagcctcccaagtatccaagggactaaagcctccacattcttcagatcaggatattcttgtttaagatgttgaactctatggaggtttgtatgaactgatgatctaggaccggataagttcccttcttcatagcgaacttattcaaagaatgttttgtgtatcattcttgttacattgttattaatgaaaaaatattattggtcattggactgaacacgagtgttaaatatggaccaggccccaaataagatccattgatatatgaattaaataacaagaataaatcgagtcaccaaaccacttgccttttttaacgagacttgttcaccaacttgatacaaaagtcattatcctatgcaaatcaataatcatacaaaaatatccaataacactaaaaaattaaaagaaatggataatttcacaatatgttatacgataaagaagttacttttccaagaaattcactgattttataagcccacttgcattagataaatggcaaaaaaaaacaaaaaggaaaagaaataaagcacgaagaattctagaaaatacgaaatacgcttcaatgcagtgggacccacggttcaattattgccaattttcagctccaccgtatatttaaaaaataaaacgataatgctaaaaaaatataaatcgtaacgatcgttaaatctcaacggctggatcttatgacgaccgttagaaattgtggttgtcgacgagtcagtaataaacggcgtcaaagtggttgcagccggcacacacgagtcgtgtttatcaactcaaagcacaaatacttttcctcaacctaaaaataaggcaattagccaaaaacaactttgcgtgtaaacaacgctcaatacacgtgtcattttattattagctattgcttcaccgccttagctttctcgtgacctagtcgtcctcgtcttttcttcttcttcttctataaaacaatacccaaagagctcttcttcttcacaattcagatttcaatttctcaaaatcttaaaaactttctctcaattctctctaccgtgatcaaggtaaatttctgtgttccttattctctcaaaatcttcgattttgttttcgttcgatcccaatttcgtatatgttctttggtttagattctgttaatcttagatcgaagacgattttctgggtttgatcgttagatatcatcttaattctcgattagggtttcatagatatcatccgatttgttcaaataatttgagttttgtcgaataattactcttcgatttgtgatttctatctagatctggtgttagtttctagtttgtgcgatcgaatttgtcgattaatctgagtttttctgattaacagacgcgt

SEQ ID NO: 23 - DNA, 630 bp, Artificial Sequence
  Synthetic Construct
ccatggttgggtaccaacaaatggctggtggacttaacgatatcttcgaagctcagaagattgaatggcatgaggatactggtggatctagcatccccggacttgaggttcttttccaaggacctctcgagccttataaatgccctgagtgtggaaaatctttctctcaatctggagatcttaggaggcaccaaaggacccataccggtgaaaaaccttataaatgccctgagtgtggaaaatcattcagtaggagtgatcatcttaccacccatcagaggacccatactggtgaaaaaccttataaatgccctgagtgtggaaaatcattctcacaatcttcatctcttgttaggcatcagaggactcataccggagaaaaaccttataaatgccctgagtgtggaaaatcattctcaacatctggaaaccttgttaggcaccaaaggacccatactggtgaaaaaccttataaatgccctgagtgtggaaaatcattctctcagagagcaaaccttagggctcatcaaaggacacacactggagaaaaaccttataaatgccctgagtgtggaaaatctttctctaggagtgataagctcaccgagcatcaaaggactcacaccggac

SEQ ID NO: 24 - DNA, 97 bp, Artificial Sequence
  Synthetic Construct
tcgaggactacaaagacgatgacgacaaagactacaaagacgatgacgacaaagactacaaagacgatgacgacaaaaagcttgatatcgccatggg

SEQ ID NO: 25 - DNA, 2166 bp, Artificial Sequence
  Synthetic Construct
atgggatccctgcccacctgcagctgtcttgatcgagttatacaaaaagacaaaggcccatattatacacaccttggggcaggaccaagtgttgctgctgtcagggaaatcatggagaataggtatggtcaaaaaggaaacgcaataaggatagaaatagtagtgtacaccggtaaagaagggaaaagctctcatgggtgtccaattgctaagtgggttttaagaagaagcagtgatgaagaaaaagttctttgtttggtccggcagcgtacaggccaccactgtccaactgctgtgatggtggtgctcatcatggtgtgggatggcatccctcttccaatggccgaccggctatacacagagctcacagagaatctaaagtcatacaatgggcaccctaccgacagaagatgcaccctcaatgaaaatcgtacctgtacatgtcaaggaattgatccagagacttgtggagcttcattctcttttggctgttcatggagtatgtactttaatggctgtaagtttggtagaagcccaagccccagaagatttagaattgatccaagctctcccttacatgaaaaaaaccttgaagataacttacagagtttggctacacgattagctccaatttataagcagtatgctccagtagcttaccaaaatcaggtggaatatgaaaatgttgcccgagaatgtcggcttggcagcaaggaaggtcgacccttctctggggtcactgcttgcctggacttctgtgctcatccccacagggacattcacaacatgaataatggaagcactgtggtttgtaccttaactcgagaagataaccgctctttgggtgttattcctcaagatgagcagctccatgtgctacctctttataagctttcagacacagatgagtttggctccaaggaaggaatggaagccaagatcaaatctggggccatcgaggtcctggcaccccgccgcaaaaaaagaacgtgtttcactcagcctgttccccgttctggaaagaagagggctgcgatgatgacagaggttcttgcacataagataagggcagtggaaaagaaacctattccccgaatcaagcggaagaataactcaacaacaacaaacaacagtaagccttcgtcactgccaaccttagggagtaacactgagaccgtgcaacctgaagtaaaaagtgaaaccgaaccccattttatcttaaaaagttcagacaacactaaaacttattcgctgatgccatccgctcctcacccagtgaaagaggcatctccaggcttctcctggtccccgaagactgcttcagccacaccagctccactgaagaatgacgcaacagcctcatgcgggttttcagaaagaagcagcactccccactgtacgatgccttcgggaagactcagtggtgccaatgctgcagctgctgatggccctggcatttcacagcttggcgaagtggctcctctccccaccctgtctgctcctgtgatggagcccctcattaattctgagccttccactggtgtgactgagccgctaacgcctcatcagccaaaccaccagccctccttcctcacctctcctcaagaccttgcctcttctccaatggaagaagatgagcagcattctgaagcagatgagcctccatcagacgaacccctatctgatgaccccctgtcacctgctgaggagaaattgccccacattgatgagtattggtcagacagtgagcacatctttttggatgcaaatattggtggggtggccatcgcacctgctcacggctcggttttgattgagtgtgcccggcgagagctgcacgctaccactcctgttgagcaccccaaccgtaatcatccaacccgcctctcccttgtcttttaccagcacaaaaacctaaataagccccaacatggttttgaactaaacaagattaagtttgaggctaaagaagctaagaataagaaaatgaaggcctcagagcaaaaagaccaggcagctaatgaaggtccagaacagtcctctgaagtaaatgaattgaaccaaattccttctcataaagcattaacattaacccatgacaatgttgtcaccgtgtccccttatgctctcacacacgttgcggggccctataaccattgggtctga

SEQ ID NO: 26 - DNA, 739 bp, Artificial Sequence
  Synthetic Construct
ctaggtgagtctagagagttaattaagacccgggactagtccctagagtcctgctttaatgagatatgcgagacgcctatgatcgcatgatatttgctttcaattctgttgtgcacgttgtaaaaaacctgagcatgtgtagctcagatccttaccgccggtttcggttcattctaatgaatatatcacccgttactatcgtatttttatgaataatattctccgttcaatttactgattgtaccctactacttatatgtacaatattaaaatgaaaacaatatattgtgctgaataggtttatagcgacatctatgatagagcgccacaataacaaacaattgcgttttattattacaaatccaattttaaaaaaagcggcagaaccggtcaaacctaaaagactgattacataaatcttattcaaatttcaaaagtgccccaggggctagtatctacgacacaccgagcggcgaactaataacgctcactgaagggaactccggttccccgccggcgcgcatgggtgagattccttgaagttgagtattggccgtccgctctaccgaaagttacgggcaccattcaacccggtccagcacggcggccgggtaaccgacttgctgccccgagaattatgcagcatttttttggtgtatgtgggccccaaatgaagtgcaggtcaaaccttgacagtgacgacaaatcgttgggcgggtccagggcgaattttgcgacg

SEQ ID NO: 27 - protein, 984 aa, Artificial Sequence
  Synthetic Construct
MVGYQQMAGGLNDIFEAQKIEWHEDTGGSSIPGLEVLFQGPLEPYKCPECGKSFSQSGDLRRHQRTHTGEKPYKCPECGKSFSRSDHLTTHQRTHTGEKPYKCPECGKSFSQSSSLVRHQRTHTGEKPYKCPECGKSFSTSGNLVRHQRTHTGEKPYKCPECGKSFSQRANLRAHQRTHTGEKPYKCPECGKSFSRSDKLTEHQRTHTGLEDYKDDDDKDYKDDDDKDYKDDDDKKLDIAMGGAPSYQTSLYKKAGSAAAPFTMGSLPTCSCLDRVIQKDKGPYYTHLGAGPSVAAVREIMENRYGQKGNAIRIEIVVYTGKEGKSSHGCPIAKWVLRRSSDEEKVLCLVRQRTGHHCPTAVMVVLIMVWDGIPLPMADRLYTELTENLKSYNGHPTDRRCTLNENRTCTCQGIDPETCGASFSFGCSWSMYFNGCKFGRSPSPRRFRIDPSSPLHEKNLEDNLQSLATRLAPIYKQYAPVAYQNQVEYENVARECRLGSKEGRPFSGVTACLDFCAHPHRDIHNMNNGSTVVCTLTREDNRSLGVIPQDEQLHVLPLYKLSDTDEFGSKEGMEAKIKSGAIEVLAPRRKKRTCFTQPVPRSGKKRAAMMTEVLAHKIRAVEKKPIPRIKRKNNSTTTNNSKPSSLPTLGSNTETVQPEVKSETEPHFILKSSDNTKTYSLMPSAPHPVKEASPGFSWSPKTASATPAPLKNDATASCGFSERSSTPHCTMPSGRLSGANAAAADGPGISQLGEVAPLPTLSAPVMEPLINSEPSTGVTEPLTPHQPNHQPSFLTSPQDLASSPMEEDEQHSEADEPPSDEPLSDDPLSPAEEKLPHIDEYWSDSEHIFLDANIGGVAIAPAHGSVLIECARRELHATTPVEHPNRNHPTRLSLVFYQHKNLNKPQHGFELNKIKFEAKEAKNKKMKASEQKDQAANEGPEQSSEVNELNQIPSHKALTLTHDNVVTVSPYALTHVAGPYNHWV

SEQ ID NO: 28 - protein, 169 aa, Artificial Sequence
  Synthetic Construct
LEPYKCPECGKSFSQSGDLRRHQRTHTGEKPYKCPECGKSFSRSDHLTTHQRTHTGEKPYKCPECGKSFSQSSSLVRHQRTHTGEKPYKCPECGKSFSTSGNLVRHQRTHTGEKPYKCPECGKSFSQRANLRAHQRTHTGEKPYKCPECGKSFSRSDKLTEHQRTHTGL

SEQ ID NO: 29 - protein, 27 aa, Artificial Sequence
  Synthetic Construct
DYKDDDDKDYKDDDDKDYKDDDDKKLD

SEQ ID NO: 30 - protein, 718 aa, Artificial Sequence; identical to SEQ ID NO: 8
  Synthetic Construct

SEQ ID NO: 31 - DNA, 9415 bp, Artificial Sequence
  Synthetic Construct
ggcgcgccatgcatatgagtctagctcaacagagcttttaacccaaattggtacaatagaatacaactttagatcataattctcaaaagaaagagattccttagctattctatctgccactccatttccttctcggcttgtatgcacaagcataaaatcctcaaacttgctaagtagatactttatgtcttggataattggattgagacttgacaagcataactttcatgtaaccaaagacacaagttgctgagaatccacctcaaaaatgatcttcctataattgaatcgggataatgacagcacagcccatctaagagcctccacttctacttccagcacgcttcttacttttaccacagctcttgcacctaaccataacaccttccctgtatgatcgcgaagcacccaccctaagccacattttaatccttctgttggccatgccccatcaaagttgcacttaacccaagattgtggtggagcttcccatgtttctcgtctgtcccgacggtgttgtggttggtgctttccttacattctgagcctctttccttctaatccactcatctgcatcttcttgtgtccttactaatacctcattggttccaaattccctccctttaagcaccagctcgtttctgttcttccacagcctcccaagtatccaagggactaaagcctccacattcttcagatcaggatattcttgtttaagatgttgaactctatggaggtttgtatgaactgatgatctaggaccggataagttcccttcttcatagcgaacttattcaaagaatgttttgtgtatcattcttgttacattgttattaatgaaaaaatattattggtcattggactgaacacgagtgttaaatatggaccaggccccaaataagatccattgatatatgaattaaataacaagaataaatcgagtcaccaaaccacttgccttttttaacgagacttgttcaccaacttgatacaaaagtcattatcctatgcaaatcaataatcatacaaaaatatccaataacactaaaaaattaaaagaaatggataatttcacaatatgttatacgataaagaagttacttttccaagaaattcactgattttataagcccacttgcattagataaatggcaaaaaaaaacaaaaaggaaaagaaataaagcacgaagaattctagaaaatacgaaatacgcttcaatgcagtgggacccacggttcaattattgccaattttcagctccaccgtatatttaaaaaataaaacgataatgctaaaaaaatataaatcgtaacgatcgttaaatctcaacggctggatcttatgacgaccgttagaaattgtggttgtcgacgagtcagtaataaacggcgtcaaagtggttgcagccggcacacacgagtcgtgtttatcaactcaaagcacaaatacttttcctcaacctaaaaataaggcaattagccaaaaacaactttgcgtgtaaacaacgctcaatacacgtgtcattttattattagctattgcttcaccgccttagctttctcgtgacctagtcgtcctcgtcttttcttcttcttcttctataaaacaatacccaaagagctcttcttcttcacaattcagatttcaatttctcaaaatcttaaaaactttctctcaattctctctaccgtgatcaaggtaaatttctgtgttccttattctctcaaaatcttcgattttgttttcgttcgatcccaatttcgtatatgttctttggtttagattctgttaatcttagatcgaagacgattttctgggtttgatcgttagatatcatcttaattctcgattagggtttcatagatatcatccgatttgttcaaataatttgagttttgtcgaataattactcttcgatttgtgatttctatctagatctggtgttagtttctagtttgtgcgatcgaatttgtcgattaatctgagtttttctgattaacagggatcatcaacaagtttgtacaaaaaagcaggctctttaaagtatttttacaacaattaccaacaacaacaaacaacaaacaacattacaattactatttacaattacaaaaaaagttaacatggacaagaagtacagcatcggcctggccatcggcaccaactctgtgggctgggccgtgatcaccgacgagtacaaggtgcccagcaagaaattcaaggtgctgggcaacaccgaccggcacagcatcaagaagaacctgatcggcgccctgctgttcgacagcggagaaacagccgaggccacccggctgaagagaaccgccagaagaagatacaccagacggaagaaccggatctgctatctgcaagagatcttcagcaacgagatggccaaggtggacgacagcttcttccacagactggaagagtccttcctggtggaagaggataagaagcacgagcggcaccccatcttcggcaacatcgtggacgaggtggcctaccacgagaagtaccccaccatctaccacctgagaaagaaactggtggacagcaccgacaaggccgacctgcggctgatctatctggccctggcccacatgatcaagttccggggccacttcctgatcgagggcgacctgaaccccgacaacagcgacgtggacaagctgttcatccagctggtgcagacctacaaccagctgttcgaggaaaaccccatcaacgccagcggcgtggacgccaaggccatcctgtctgccagactgagcaagagcagacggctggaaaatctgatcgcccagctgcccggcgagaagaagaatggcctgttcggcaacctgattgccctgagcctgggcctgacccccaacttcaagagcaacttcgacctggccgaggatgccaaactgcagctgagcaaggacacctacgacgacgacctggacaacctgctggcccagatcggcgaccagtacgccgacctgtttctggccgccaagaacctgtccgacgccatcctgctgagcgacatcctgagagtgaacaccgagatcaccaaggcccccctgagcgcctctatgatcaagagatacgacgagcaccaccaggacctgaccctgctgaaagctctcgtgcggcagcagctgcctgagaagtacaaagagattttcttcgaccagagcaagaacggctacgccggctacatcgatggcggagccagccaggaagagttctacaagttcatcaagcccatcctggaaaagatggacggcaccgaggaactgctcgtgaagctgaacagagaggacctgctgcggaagcagcggaccttcgacaacggcagcatcccccaccagatccacctgggagagctgcacgccattctgcggcggcaggaagatttttacccattcctgaaggacaaccgggaaaagatcgagaagatcctgaccttccgcatcccctactacgtgggccctctggccaggggaaacagcagattcgcctggatgaccagaaagagcgaggaaaccatcaccccctggaacttcgaggaagtggtggacaagggcgccagcgcccagagcttcatcgagcggatgaccaacttcgataagaacctgcccaacgagaaggtgctgcccaagcacagcctgctgtacgagtacttcaccgtgtacaacgagctgaccaaagtgaaatacgtgaccgagggaatgagaaagcccgccttcctgagcggcgagcagaaaaaagccatcgtggacctgctgttcaagaccaaccggaaagtgaccgtgaagcagctgaaagaggactacttcaagaaaatcgagtgcttcgactccgtggaaatctccggcgtggaagatcggttcaacgcctccctgggcacataccacgatctgctgaaaattatcaaggacaaggacttcctggacaatgaggaaaacgaggacattctggaagatatcgtgctgaccctgacactgtttgaggacagagagatgatcgaggaacggctgaaaacctatgcccacctgttcgacgacaaagtgatgaagcagctgaagcggcggagatacaccggctggggcaggctgagccggaagctgatcaacggcatccgggacaagcagtccggcaagacaatcctggatttcctgaagtccgacggcttcgccaacagaaacttcatgcagctgatccacgacgacagcctgacctttaaagaggacatccagaaagcccaggtgtccggccagggcgatagcctgcacgagcacattgccaatctggccggcagccccgccattaagaagggcatcctgcagacagtgaaggtggtggacgagctcgtgaaagtgatgggccggcacaagcccgagaacatcgtgatcgaaatggccagagagaaccagaccacccagaagggacagaagaacagccgcgagagaatgaagcggatcgaagagggcatcaaagagctgggcagccagatcctgaaagaacaccccgtggaaaacacccagctgcagaacgagaagctgtacctgtactacctgcagaatgggcgggatatgtacgtggaccaggaactggacatcaaccggctgtccgactacgatgtggacgctatcgtgcctcagagctttctgaaggacgactccatcgataacaaagtgctgactcggagcgacaagaaccggggcaagagcgacaacgtgccctccgaagaggtcgtgaagaagatgaagaactactggcgccagctgctgaatgccaagctgattacccagaggaagttcgacaatctgaccaaggccgagagaggcggcctgagcgaactggataaggccggcttcatcaagagacagctggtggaaacccggcagatcacaaagcacgtggcacagatcctggactcccggatgaacactaagtacgacgagaacgacaaactgatccgggaagtgaaagtgatcaccctgaagtccaagctggtgtccgatttccggaaggatttccagttttacaaagtgcgcgagatcaacaactaccaccacgcccacgacgcctacctgaacgccgtcgtgggaaccgccctgatcaaaaagtaccctaagctggaaagcgagttcgtgtacggcgactacaaggtgtacgacgtgcggaagatgatcgccaagagcgagcaggaaatcggcaaggctaccgccaagtacttcttctacagcaacatcatgaactttttcaagaccgagattaccctggccaacggcgagatccggaagcggcctctgatcgagacaaacggcgaaacaggcgagatcgtgtgggataagggccgggactttgccaccgtgcggaaagtgctgtctatgccccaagtgaatatcgtgaaaaagaccgaggtgcagacaggcggcttcagcaaagagtctatcctgcccaagaggaacagcgacaagctgatcgccagaaagaaggactgggaccctaagaagtacggcggcttcgacagccccaccgtggcctattctgtgctggtggtggccaaagtggaaaagggcaagtccaagaaactgaagagtgtgaaagagctgctggggatcaccatcatggaaagaagcagcttcgagaagaatcccatcgactttctggaagccaagggctacaaagaagtgaaaaaggacctgatcatcaagctgcctaagtactccctgttcgagctggaaaacggccggaagagaatgctggcctctgccggcgaactgcagaagggaaacgaactggccctgccctccaaatatgtgaacttcctgtacctggccagccactatgagaagctgaagggctcccccgaggataatgagcagaaacagctgtttgtggaacagcacaaacactacctggacgagatcatcgagcagatcagcgagttctccaagagagtgatcctggccgacgctaatctggacaaggtgctgagcgcctacaacaagcacagagacaagcctatcagagagcaggccgagaatatcatccacctgtttaccctgaccaatctgggagcccctgccgccttcaagtactttgacaccaccatcgaccggaagaggtacaccagcaccaaagaggtgctggacgccaccctgatccaccagagcatcaccggcctgtacgagacacggatcgacctgtctcagctgggaggcgacgccggcgcgccaagctatcaaacaagtttgtacaaaaaagcaggctccgcggccgcccccttcaccatgcgtacgtatccctatgacgtgcccgattatgccagcctgggcagcggcgctcccaagaaaaaacgcaaggtggaagctcctaagaaaaagcggaaagtgggcggtggcggatccgggctgcccacctgcagctgtcttgatcgagttatacaaaaagacaaaggcccatattatacacaccttggggcaggaccaagtgttgctgctgtcagggaaatcatggagaataggtatggtcaaaaaggaaacgcaataaggatagaaatagtagtgtacaccggtaaagaagggaaaagctctcatgggtgtccaattgctaagtgggttttaagaagaagcagtgatgaagaaaaagttctttgtttggtccggcagcgtacaggccaccactgtccaactgctgtgatggtggtgctcatcatggtgtgggatggcatccctcttccaatggccgaccggctatacacagagctcacagagaatctaaagtcatacaatgggcaccctaccgacagaagatgcaccctcaatgaaaatcgtacctgtacatgtcaaggaattgatccagagacttgtggagcttcattctcttttggctgttcatggagtatgtactttaatggctgtaagtttggtagaagcccaagccccagaagatttagaattgatccaagctctcccttacatgaaaaaaaccttgaagataacttacagagtttggctacacgattagctccaatttataagcagtatgctccagtagcttaccaaaatcaggtggaatatgaaaatgttgcccgagaatgtcggcttggcagcaaggaaggtcgacccttctctggggtcactgcttgcctggacttctgtgctcatccccacagggacattcacaacatgaataatggaagcactgtggtttgtaccttaactcgagaagataaccgctctttgggtgttattcctcaagatgagcagctccatgtgctacctctttataagctttcagacacagatgagtttggctccaaggaaggaatggaagccaagatcaaatctggggccatcgaggtcctggcaccccgccgcaaaaaaagaacgtgtttcactcagcctgttccccgttctggaaagaagagggctgcgatgatgacagaggttcttgcacataagataagggcagtggaaaagaaacctattccccgaatcaagcggaagaataactcaacaacaacaaacaacagtaagccttcgtcactgccaaccttagggagtaacactgagaccgtgcaacctgaagtaaaaagtgaaaccgaaccccattttatcttaaaaagttcagacaacactaaaacttattcgctgatgccatccgctcctcacccagtgaaagaggcatctccaggcttctcctggtccccgaagactgcttcagccacaccagctccactgaagaatgacgcaacagcctcatgcgggttttcagaaagaagcagcactccccactgtacgatgccttcgggaagactcagtggtgccaatgctgcagctgctgatggccctggcatttcacagcttggcgaagtggctcctctccccaccctgtctgctcctgtgatggagcccctcattaattctgagccttccactggtgtgactgagccgctaacgcctcatcagccaaaccaccagccctccttcctcacctctcctcaagaccttgcctcttctccaatggaagaagatgagcagcattctgaagcagatgagcctccatcagacgaacccctatctgatgaccccctgtcacctgctgaggagaaattgccccacattgatgagtattggtcagacagtgagcacatctttttggatgcaaatattggtggggtggccatcgcacctgctcacggctcggttttgattgagtgtgcccggcgagagctgcacgctaccactcctgttgagcaccccaaccgtaatcatccaacccgcctctcccttgtcttttaccagcacaaaaacctaaataagccccaacatggttttgaactaaacaagattaagtttgaggctaaagaagctaagaataagaaaatgaaggcctcagagcaaaaagaccaggcagctaatgaaggtccagaacagtcctctgaagtaaatgaattgaaccaaattccttctcataaagcattaacattaacccatgacaatgttgtcaccgtgtccccttatgctctcacacacgttgcggggccctataaccattgggtctgacgtacgaagggtgggcgcgccgacccagctttcttgtacaaagtggttcgataattccttaattaactagttctagagcggccgccaccgcggtggagctcctaggtgagtctagagagttaattaagacccgggactagtccctagagtcctgctttaatgagatatgcgagacgcctatgatcgcatgatatttgctttcaattctgttgtgcacgttgtaaaaaacctgagcatgtgtagctcagatccttaccgccggtttcggttcattctaatgaatatatcacccgttactatcgtatttttatgaataatattctccgttcaatttactgattgtaccctactacttatatgtacaatattaaaatgaaaacaatatattgtgctgaataggtttatagcgacatctatgatagagcgccacaataacaaacaattgcgttttattattacaaatccaattttaaaaaaagcggcagaaccggtcaaacctaaaagactgattacataaatcttattcaaatttcaaaagtgccccaggggctagtatctacgacacaccgagcggcgaactaataacgctcactgaagggaactccggttccccgccggcgcgcatgggtgagattccttgaagttgagtattggccgtccgctctaccgaaagttacgggcaccattcaacccggtccagcacggcggccgggtaaccgacttgctgccccgagaattatgcagcatttttttggtgtatgtgggccccaaatgaagtgcaggtcaaaccttgacagtgacgacaaatcgttgggcgggtccagggcgaattttgcgacgagct

SEQ ID NO: 32 - DNA, 1995 bp, Artificial Sequence
  Synthetic Construct
atgcatatgagtctagctcaacagagcttttaacccaaattggtacaatagaatacaactttagatcataattctcaaaagaaagagattccttagctattctatctgccactccatttccttctcggcttgtatgcacaagcataaaatcctcaaacttgctaagtagatactttatgtcttggataattggattgagacttgacaagcataactttcatgtaaccaaagacacaagttgctgagaatccacctcaaaaatgatcttcctataattgaatcgggataatgacagcacagcccatctaagagcctccacttctacttccagcacgcttcttacttttaccacagctcttgcacctaaccataacaccttccctgtatgatcgcgaagcacccaccctaagccacattttaatccttctgttggccatgccccatcaaagttgcacttaacccaagattgtggtggagcttcccatgtttctcgtctgtcccgacggtgttgtggttggtgctttccttacattctgagcctctttccttctaatccactcatctgcatcttcttgtgtccttactaatacctcattggttccaaattccctccctttaagcaccagctcgtttctgttcttccacagcctcccaagtatccaagggactaaagcctccacattcttcagatcaggatattcttgtttaagatgttgaactctatggaggtttgtatgaactgatgatctaggaccggataagttcccttcttcatagcgaacttattcaaagaatgttttgtgtatcattcttgttacattgttattaatgaaaaaatattattggtcattggactgaacacgagtgttaaatatggaccaggccccaaataagatccattgatatatgaattaaataacaagaataaatcgagtcaccaaaccacttgccttttttaacgagacttgttcaccaacttgatacaaaagtcattatcctatgcaaatcaataatcatacaaaaatatccaataacactaaaaaattaaaagaaatggataatttcacaatatgttatacgataaagaagttacttttccaagaaattcactgattttataagcccacttgcattagataaatggcaaaaaaaaacaaaaaggaaaagaaataaagcacgaagaattctagaaaatacgaaatacgcttcaatgcagtgggacccacggttcaattattgccaattttcagctccaccgtatatttaaaaaataaaacgataatgctaaaaaaatataaatcgtaacgatcgttaaatctcaacggctggatcttatgacgaccgttagaaattgtggttgtcgacgagtcagtaataaacggcgtcaaagtggttgcagccggcacacacgagtcgtgtttatcaactcaaagcacaaatacttttcctcaacctaaaaataaggcaattagccaaaaacaactttgcgtgtaaacaacgctcaatacacgtgtcattttattattagctattgcttcaccgccttagctttctcgtgacctagtcgtcctcgtcttttcttcttcttcttctataaaacaatacccaaagagctcttcttcttcacaattcagatttcaatttctcaaaatcttaaaaactttctctcaattctctctaccgtgatcaaggtaaatttctgtgttccttattctctcaaaatcttcgattttgttttcgttcgatcccaatttcgtatatgttctttggtttagattctgttaatcttagatcgaagacgattttctgggtttgatcgttagatatcatcttaattctcgattagggtttcatagatatcatccgatttgttcaaataatttgagttttgtcgaataattactcttcgatttgtgatttctatctagatctggtgttagtttctagtttgtgcgatcgaatttgtcgattaatctgagtttttctgattaacag

SEQ ID NO: 33 - DNA, 115 bp, Artificial Sequence
  Synthetic Construct
ggatcatcaacaagtttgtacaaaaaagcaggctctttaaagtatttttacaacaattaccaacaacaacaaacaacaaacaacattacaattactatttacaattacaaaaaaa

SEQ ID NO: 34 - DNA, 4107 bp, Artificial Sequence
  Synthetic Construct
atggacaagaagtacagcatcggcctggccatcggcaccaactctgtgggctgggccgtgatcaccgacgagtacaaggtgcccagcaagaaattcaaggtgctgggcaacaccgaccggcacagcatcaagaagaacctgatcggcgccctgctgttcgacagcggagaaacagccgaggccacccggctgaagagaaccgccagaagaagatacaccagacggaagaaccggatctgctatctgcaagagatcttcagcaacgagatggccaaggtggacgacagcttcttccacagactggaagagtccttcctggtggaagaggataagaagcacgagcggcaccccatcttcggcaacatcgtggacgaggtggcctaccacgagaagtaccccaccatctaccacctgagaaagaaactggtggacagcaccgacaaggccgacctgcggctgatctatctggccctggcccacatgatcaagttccggggccacttcctgatcgagggcgacctgaaccccgacaacagcgacgtggacaagctgttcatccagctggtgcagacctacaaccagctgttcgaggaaaaccccatcaacgccagcggcgtggacgccaaggccatcctgtctgccagactgagcaagagcagacggctggaaaatctgatcgcccagctgcccggcgagaagaagaatggcctgttcggcaacctgattgccctgagcctgggcctgacccccaacttcaagagcaacttcgacctggccgaggatgccaaactgcagctgagcaaggacacctacgacgacgacctggacaacctgctggcccagatcggcgaccagtacgccgacctgtttctggccgccaagaacctgtccgacgccatcctgctgagcgacatcctgagagtgaacaccgagatcaccaaggcccccctgagcgcctctatgatcaagagatacgacgagcaccaccaggacctgaccctgctgaaagctctcgtgcggcagcagctgcctgagaagtacaaagagattttcttcgaccagagcaagaacggctacgccggctacatcgatggcggagccagccaggaagagttctacaagttcatcaagcccatcctggaaaagatggacggcaccgaggaactgctcgtgaagctgaacagagaggacctgctgcggaagcagcggaccttcgacaacggcagcatcccccaccagatccacctgggagagctgcacgccattctgcggcggcaggaagatttttacccattcctgaaggacaaccgggaaaagatcgagaagatcctgaccttccgcatcccctactacgtgggccctctggccaggggaaacagcagattcgcctggatgaccagaaagagcgaggaaaccatcaccccctggaacttcgaggaagtggtggacaagggcgccagcgcccagagcttcatcgagcggatgaccaacttcgataagaacctgcccaacgagaaggtgctgcccaagcacagcctgctgtacgagtacttcaccgtgtacaacgagctgaccaaagtgaaatacgtgaccgagggaatgagaaagcccgccttcctgagcggcgagcagaaaaaagccatcgtggacctgctgttcaagaccaaccggaaagtgaccgtgaagcagctgaaagaggactacttcaagaaaatcgagtgcttcgactccgtggaaatctccggcgtggaagatcggttcaacgcctccctgggcacataccacgatctgctgaaaattatcaaggacaaggacttcctggacaatgaggaaaacgaggacattctggaagatatcgtgctgaccctgacactgtttgaggacagagagatgatcgaggaacggctgaaaacctatgcccacctgttcgacgacaaagtgatgaagcagctgaagcggcggagatacaccggctggggcaggctgagccggaagctgatcaacggcatccgggacaagcagtccggcaagacaatcctggatttcctgaagtccgacggcttcgccaacagaaacttcatgcagctgatccacgacgacagcctgacctttaaagaggacatccagaaagcccaggtgtccggccagggcgatagcctgcacgagcacattgccaatctggccggcagccccgccattaagaagggcatcctgcagacagtgaaggtggtggacgagctcgtgaaagtgatgggccggcacaagcccgagaacatcgtgatcgaaatggccagagagaaccagaccacccagaagggacagaagaacagccgcgagagaatgaagcggatcgaagagggcatcaaagagctgggcagccagatcctgaaagaacaccccgtggaaaacacccagctgcagaacgagaagctgtacctgtactacctgcagaatgggcgggatatgtacgtggaccaggaactggacatcaaccggctgtccgactacgatgtggacgctatcgtgcctcagagctttctgaaggacgactccatcgataacaaagtgctgactcggagcgacaagaaccggggcaagagcgacaacgtgccctccgaagaggtcgtgaagaagatgaagaactactggcgccagctgctgaatgccaagctgattacccagaggaagttcgacaatctgaccaaggccgagagaggcggcctgagcgaactggataaggccggcttcatcaagagacagctggtggaaacccggcagatcacaaagcacgtggcacagatcctggactcccggatgaacactaagtacgacgagaacgacaaactgatccgggaagtgaaagtgatcaccctgaagtccaagctggtgtccgatttccggaaggatttccagttttacaaagtgcgcgagatcaacaactaccaccacgcccacgacgcctacctgaacgccgtcgtgggaaccgccctgatcaaaaagtaccctaagctggaaagcgagttcgtgtacggcgactacaaggtgtacgacgtgcggaagatgatcgccaagagcgagcaggaaatcggcaaggctaccgccaagtacttcttctacagcaacatcatgaactttttcaagaccgagattaccctggccaacggcgagatccggaagcggcctctgatcgagacaaacggcgaaacaggcgagatcgtgtgggataagggccgggactttgccaccgtgcggaaagtgctgtctatgccccaagtgaatatcgtgaaaaagaccgaggtgcagacaggcggcttcagcaaagagtctatcctgcccaagaggaacagcgacaagctgatcgccagaaagaaggactgggaccctaagaagtacggcggcttcgacagccccaccgtggcctattctgtgctggtggtggccaaagtggaaaagggcaagtccaagaaactgaagagtgtgaaagagctgctggggatcaccatcatggaaagaagcagcttcgagaagaatcccatcgactttctggaagccaagggctacaaagaagtgaaaaaggacctgatcatcaagctgcctaagtactccctgttcgagctggaaaacggccggaagagaatgctggcctctgccggcgaactgcagaagggaaacgaactggccctgccctccaaatatgtgaacttcctgtacctggccagccactatgagaagctgaagggctcccccgaggataatgagcagaaacagctgtttgtggaacagcacaaacactacctggacgagatcatcgagcagatcagcgagttctccaagagagtgatcctggccgacgctaatctggacaaggtgctgagcgcctacaacaagcacagagacaagcctatcagagagcaggccgagaatatcatccacctgtttaccctgaccaatctgggagcccctgccgccttcaagtactttgacaccaccatcgaccggaagaggtacaccagcaccaaagaggtgctggacgccaccctgatccaccagagcatcaccggcctgtacgagacacggatcgacctgtctcagctgggaggcgacgcc

SEQ ID NO: 35 - DNA, 27 bp, Artificial Sequence
  Synthetic Construct
tatccctatgacgtgcccgattatgcc

SEQ ID NO: 36 - DNA, 48 bp, Artificial Sequence
  Synthetic Construct
cccaagaaaaaacgcaaggtggaagctcctaagaaaaagcggaaagtg

SEQ ID NO: 37 - DNA, 18 bp, Artificial Sequence
  Synthetic Construct
ggcggtggcggatccggg

SEQ ID NO: 38 - DNA, 2157 bp, Artificial Sequence
  Synthetic Construct
ctgcccacctgcagctgtcttgatcgagttatacaaaaagacaaaggcccatattatacacaccttggggcaggaccaagtgttgctgctgtcagggaaatcatggagaataggtatggtcaaaaaggaaacgcaataaggatagaaatagtagtgtacaccggtaaagaagggaaaagctctcatgggtgtccaattgctaagtgggttttaagaagaagcagtgatgaagaaaaagttctttgtttggtccggcagcgtacaggccaccactgtccaactgctgtgatggtggtgctcatcatggtgtgggatggcatccctcttccaatggccgaccggctatacacagagctcacagagaatctaaagtcatacaatgggcaccctaccgacagaagatgcaccctcaatgaaaatcgtacctgtacatgtcaaggaattgatccagagacttgtggagcttcattctcttttggctgttcatggagtatgtactttaatggctgtaagtttggtagaagcccaagccccagaagatttagaattgatccaagctctcccttacatgaaaaaaaccttgaagataacttacagagtttggctacacgattagctccaatttataagcagtatgctccagtagcttaccaaaatcaggtggaatatgaaaatgttgcccgagaatgtcggcttggcagcaaggaaggtcgacccttctctggggtcactgcttgcctggacttctgtgctcatccccacagggacattcacaacatgaataatggaagcactgtggtttgtaccttaactcgagaagataaccgctctttgggtgttattcctcaagatgagcagctccatgtgctacctctttataagctttcagacacagatgagtttggctccaaggaaggaatggaagccaagatcaaatctggggccatcgaggtcctggcaccccgccgcaaaaaaagaacgtgtttcactcagcctgttccccgttctggaaagaagagggctgcgatgatgacagaggttcttgcacataagataagggcagtggaaaagaaacctattccccgaatcaagcggaagaataactcaacaacaacaaacaacagtaagccttcgtcactgccaaccttagggagtaacactgagaccgtgcaacctgaagtaaaaagtgaaaccgaaccccattttatcttaaaaagttcagacaacactaaaacttattcgctgatgccatccgctcctcacccagtgaaagaggcatctccaggcttctcctggtccccgaagactgcttcagccacaccagctccactgaagaatgacgcaacagcctcatgcgggttttcagaaagaagcagcactccccactgtacgatgccttcgggaagactcagtggtgccaatgctgcagctgctgatggccctggcatttcacagcttggcgaagtggctcctctccccaccctgtctgctcctgtgatggagcccctcattaattctgagccttccactggtgtgactgagccgctaacgcctcatcagccaaaccaccagccctccttcctcacctctcctcaagaccttgcctcttctccaatggaagaagatgagcagcattctgaagcagatgagcctccatcagacgaacccctatctgatgaccccctgtcacctgctgaggagaaattgccccacattgatgagtattggtcagacagtgagcacatctttttggatgcaaatattggtggggtggccatcgcacctgctcacggctcggttttgattgagtgtgcccggcgagagctgcacgctaccactcctgttgagcaccccaaccgtaatcatccaacccgcctctcccttgtcttttaccagcacaaaaacctaaataagccccaacatggttttgaactaaacaagattaagtttgaggctaaagaagctaagaataagaaaatgaaggcctcagagcaaaaagaccaggcagctaatgaaggtccagaacagtcctctgaagtaaatgaattgaaccaaattccttctcataaagcattaacattaacccatgacaatgttgtcaccgtgtccccttatgctctcacacacgttgcggggccctataaccattgggtctga

SEQ ID NO: 39 - DNA, 744 bp, Artificial Sequence
  Synthetic Construct
cctaggtgagtctagagagttaattaagacccgggactagtccctagagtcctgctttaatgagatatgcgagacgcctatgatcgcatgatatttgctttcaattctgttgtgcacgttgtaaaaaacctgagcatgtgtagctcagatccttaccgccggtttcggttcattctaatgaatatatcacccgttactatcgtatttttatgaataatattctccgttcaatttactgattgtaccctactacttatatgtacaatattaaaatgaaaacaatatattgtgctgaataggtttatagcgacatctatgatagagcgccacaataacaaacaattgcgttttattattacaaatccaattttaaaaaaagcggcagaaccggtcaaacctaaaagactgattacataaatcttattcaaatttcaaaagtgccccaggggctagtatctacgacacaccgagcggcgaactaataacgctcactgaagggaactccggttccccgccggcgcgcatgggtgagattccttgaagttgagtattggccgtccgctctaccgaaagttacgggcaccattcaacccggtccagcacggcggccgggtaaccgacttgctgccccgagaattatgcagcatttttttggtgtatgtgggccccaaatgaagtgcaggtcaaaccttgacagtgacgacaaatcgttgggcgggtccagggcgaattttgcgacgagct

SEQ ID NO: 40 - protein, 2148 aa, Artificial Sequence
  Synthetic Construct
MDKKYSIGLAIGTNSVGWAVITDEYKVPSKKFKVLGNTDRHSIKKNLIGALLFDSGETAEATRLKRTARRRYTRRKNRICYLQEIFSNEMAKVDDSFFHRLEESFLVEEDKKHERHPIFGNIVDEVAYHEKYPTIYHLRKKLVDSTDKADLRLIYLALAHMIKFRGHFLIEGDLNPDNSDVDKLFIQLVQTYNQLFEENPINASGVDAKAILSARLSKSRRLENLIAQLPGEKKNGLFGNLIALSLGLTPNFKSNFDLAEDAKLQLSKDTYDDDLDNLLAQIGDQYADLFLAAKNLSDAILLSDILRVNTEITKAPLSASMIKRYDEHHQDLTLLKALVRQQLPEKYKEIFFDQSKNGYAGYIDGGASQEEFYKFIKPILEKMDGTEELLVKLNREDLLRKQRTFDNGSIPHQIHLGELHAILRRQEDFYPFLKDNREKIEKILTFRIPYYVGPLARGNSRFAWMTRKSEETITPWNFEEVVDKGASAQSFIERMTNFDKNLPNEKVLPKHSLLYEYFTVYNELTKVKYVTEGMRKPAFLSGEQKKAIVDLLFKTNRKVTVKQLKEDYFKKIECFDSVEISGVEDRFNASLGTYHDLLKIIKDKDFLDNEENEDILEDIVLTLTLFEDREMIEERLKTYAHLFDDKVMKQLKRRRYTGWGRLSRKLINGIRDKQSGKTILDFLKSDGFANRNFMQLIHDDSLTFKEDIQKAQVSGQGDSLHEHIANLAGSPAIKKGILQTVKVVDELVKVMGRHKPENIVIEMARENQTTQKGQKNSRERMKRIEEGIKELGSQILKEHPVENTQLQNEKLYLYYLQNGRDMYVDQELDINRLSDYDVDAIVPQSFLKDDSIDNKVLTRSDKNRGKSDNVPSEEVVKKMKNYWRQLLNAKLITQRKFDNLTKAERGGLSELDKAGFIKRQLVETRQITKHVAQILDSRMNTKYDENDKLIREVKVITLKSKLVSDFRKDFQFYKVREINNYHHAHDAYLNAVVGTALIKKYPKLESEFVYGDYKVYDVRKMIAKSEQEIGKATAKYFFYSNIMNFFKTEITLANGEIRKRPLIETNGETGEIVWDKGRDFATVRKVLSMPQVNIVKKTEVQTGGFSKESILPKRNSDKLIARKKDWDPKKYGGFDSPTVAYSVLVVAKVEKGKSKKLKSVKELLGITIMERSSFEKNPIDFLEAKGYKEVKKDLIIKLPKYSLFELENGRKRMLASAGELQKGNELALPSKYVNFLYLASHYEKLKGSPEDNEQKQLFVEQHKHYLDEIIEQISEFSKRVILADANLDKVLSAYNKHRDKPIREQAENIIHLFTLTNLGAPAAFKYFDTTIDRKRYTSTKEVLDATLIHQSITGLYETRIDLSQLGGDAGAPSYQTSLYKKAGSAAAPFTMRTYPYDVPDYASLGSGAPKKKRKVEAPKKKRKVGGGGSGLPTCSCLDRVIQKDKGPYYTHLGAGPSVAAVREIMENRYGQKGNAIRIEIVVYTGKEGKSSHGCPIAKWVLRRSSDEEKVLCLVRQRTGHHCPTAVMVVLIMVWDGIPLPMADRLYTELTENLKSYNGHPTDRRCTLNENRTCTCQGIDPETCGASFSFGCSWSMYFNGCKFGRSPSPRRFRIDPSSPLHEKNLEDNLQSLATRLAPIYKQYAPVAYQNQVEYENVARECRLGSKEGRPFSGVTACLDFCAHPHRDIHNMNNGSTVVCTLTREDNRSLGVIPQDEQLHVLPLYKLSDTDEFGSKEGMEAKIKSGAIEVLAPRRKKRTCFTQPVPRSGKKRAAMMTEVLAHKIRAVEKKPIPRIKRKNNSTTTNNSKPSSLPTLGSNTETVQPEVKSETEPHFILKSSDNTKTYSLMPSAPHPVKEASPGFSWSPKTASATPAPLKNDATASCGFSERSSTPHCTMPSGRLSGANAAAADGPGISQLGEVAPLPTLSAPVMEPLINSEPSTGVTEPLTPHQPNHQPSFLTSPQDLASSPMEEDEQHSEADEPPSDEPLSDDPLSPAEEKLPHIDEYWSDSEHIFLDANIGGVAIAPAHGSVLIECARRELHATTPVEHPNRNHPTRLSLVFYQHKNLNKPQHGFELNKIKFEAKEAKNKKMKASEQKDQAANEGPEQSSEVNELNQIPSHKALTLTHDNVVTVSPYALTHVAGPYNHWV

SEQ ID NO: 41 - protein, 1369 aa, Artificial Sequence
  Synthetic Construct
MDKKYSIGLAIGTNSVGWAVITDEYKVPSKKFKVLGNTDRHSIKKNLIGALLFDSGETAEATRLKRTARRRYTRRKNRICYLQEIFSNEMAKVDDSFFHRLEESFLVEEDKKHERHPIFGNIVDEVAYHEKYPTIYHLRKKLVDSTDKADLRLIYLALAHMIKFRGHFLIEGDLNPDNSDVDKLFIQLVQTYNQLFEENPINASGVDAKAILSARLSKSRRLENLIAQLPGEKKNGLFGNLIALSLGLTPNFKSNFDLAEDAKLQLSKDTYDDDLDNLLAQIGDQYADLFLAAKNLSDAILLSDILRVNTEITKAPLSASMIKRYDEHHQDLTLLKALVRQQLPEKYKEIFFDQSKNGYAGYIDGGASQEEFYKFIKPILEKMDGTEELLVKLNREDLLRKQRTFDNGSIPHQIHLGELHAILRRQEDFYPFLKDNREKIEKILTFRIPYYVGPLARGNSRFAWMTRKSEETITPWNFEEVVDKGASAQSFIERMTNFDKNLPNEKVLPKHSLLYEYFTVYNELTKVKYVTEGMRKPAFLSGEQKKAIVDLLFKTNRKVTVKQLKEDYFKKIECFDSVEISGVEDRFNASLGTYHDLLKIIKDKDFLDNEENEDILEDIVLTLTLFEDREMIEERLKTYAHLFDDKVMKQLKRRRYTGWGRLSRKLINGIRDKQSGKTILDFLKSDGFANRNFMQLIHDDSLTFKEDIQKAQVSGQGDSLHEHIANLAGSPAIKKGILQTVKVVDELVKVMGRHKPENIVIEMARENQTTQKGQKNSRERMKRIEEGIKELGSQILKEHPVENTQLQNEKLYLYYLQNGRDMYVDQELDINRLSDYDVDAIVPQSFLKDDSIDNKVLTRSDKNRGKSDNVPSEEVVKKMKNYWRQLLNAKLITQRKFDNLTKAERGGLSELDKAGFIKRQLVETRQITKHVAQILDSRMNTKYDENDKLIREVKVITLKSKLVSDFRKDFQFYKVREINNYHHAHDAYLNAVVGTALIKKYPKLESEFVYGDYKVYDVRKMIAKSEQEIGKATAKYFFYSNIMNFFKTEITLANGEIRKRPLIETNGETGEIVWDKGRDFATVRKVLSMPQVNIVKKTEVQTGGFSKESILPKRNSDKLIARKKDWDPKKYGGFDSPTVAYSVLVVAKVEKGKSKKLKSVKELLGITIMERSSFEKNPIDFLEAKGYKEVKKDLIIKLPKYSLFELENGRKRMLASAGELQKGNELALPSKYVNFLYLASHYEKLKGSPEDNEQKQLFVEQHKHYLDEIIEQISEFSKRVILADANLDKVLSAYNKHRDKPIREQAENIIHLFTLTNLGAPAAFKYFDTTIDRKRYTSTKEVLDATLIHQSITGLYETRIDLSQLGGDA

SEQ ID NO: 42 - protein, 9 aa, Artificial Sequence
  Synthetic Construct
YPYDVPDYA

SEQ ID NO: 43 - protein, 16 aa, Artificial Sequence
  Synthetic Construct
PKKKRKVEAPKKKRKV

SEQ ID NO: 44 - protein, 6 aa, Artificial Sequence
  Synthetic Construct
GGGGSG

SEQ ID NO: 45 - protein, 718 aa, Artificial Sequence; identical to SEQ ID NO: 8
  Synthetic Construct

SEQ ID NO: 46 - DNA, 793 bp, Artificial Sequence
  Synthetic Construct
ggccgcaatattacaacttgtttaagctttcgttgaacaacggaaactcgacttgccttccgcacaatacatcatttcttcttagctttttttcttcttcttcgttcatacagtttttttttgtttatcagcttacattttcttgaaccgtagctttcgttttcttctttttaactttccattcggagtttttgtatcttgtttcatagtttgtcccaggattagaatgattaggcatcgaaccttcaagaatttgattgaataaaacatcttcattcttaagatatgaagataatcttcaaaaggcccctgggaatctgaaagaagagaagcaggcccatttatatgggaaagaacaatagtatttcttatataggcccatttaagttgaaaacaatcttcaaaagtcccacatcgcttagataagaaaacgaagctgagtttatatacagctagagtcgaagtagtgattgaacaaagcaccagtggtctagtggtagaatagtaccctgccacggtacagacccgggttcgattcccggctggtgcagacggaaagatgtatgggcttgttttagagctagaaatagcaagttaaaataaggctagtccgttatcaacttgaaaaagtggcaccgagtcggtgcgtttaacaaagcaccagtggtctagtggtagaatagtaccctgccacggtacagacccgggttcgattcccggctggtgcaaaactaggccatccatggagtttaaacaaacaaactttttttaaaccaccccgtgtcaacgcggc

SEQ ID NO: 47 - DNA, 473 bp, Artificial Sequence
  Synthetic Construct
ggccgcaatattacaacttgtttaagctttcgttgaacaacggaaactcgacttgccttccgcacaatacatcatttcttcttagctttttttcttcttcttcgttcatacagtttttttttgtttatcagcttacattttcttgaaccgtagctttcgttttcttctttttaactttccattcggagtttttgtatcttgtttcatagtttgtcccaggattagaatgattaggcatcgaaccttcaagaatttgattgaataaaacatcttcattcttaagatatgaagataatcttcaaaaggcccctgggaatctgaaagaagagaagcaggcccatttatatgggaaagaacaatagtatttcttatataggcccatttaagttgaaaacaatcttcaaaagtcccacatcgcttagataagaaaacgaagctgagtttatatacagctagagtcgaagtagtgattg

SEQ ID NO: 48 - DNA, 77 bp, Artificial Sequence
  Synthetic Construct
aacaaagcaccagtggtctagtggtagaatagtaccctgccacggtacagacccgggttcgattcccggctggtgca

SEQ ID NO: 49 - DNA, 76 bp, Artificial Sequence
  Synthetic Construct
gttttagagctagaaatagcaagttaaaataaggctagtccgttatcaacttgaaaaagtggcaccgagtcggtgc

SEQ ID NO: 50 - DNA, 7 bp, Artificial Sequence
  Synthetic Construct
ttttttt

SEQ ID NO: 51 - DNA, 1223 bp, Artificial Sequence
  Synthetic Construct
ggccgcaatattacaacttgtttaagctttcgttgaacaacggaaactcgacttgccttccgcacaatacatcatttcttcttagctttttttcttcttcttcgttcatacagtttttttttgtttatcagcttacattttcttgaaccgtagctttcgttttcttctttttaactttccattcggagtttttgtatcttgtttcatagtttgtcccaggattagaatgattaggcatcgaaccttcaagaatttgattgaataaaacatcttcattcttaagatatgaagataatcttcaaaaggcccctgggaatctgaaagaagagaagcaggcccatttatatgggaaagaacaatagtatttcttatataggcccatttaagttgaaaacaatcttcaaaagtcccacatcgcttagataagaaaacgaagctgagtttatatacagctagagtcgaagtagtgattgaacaaagcaccagtggtctagtggtagaatagtaccctgccacggtacagacccgggttcgattcccggctggtgcagcggcgcaagatctgatattgttttagagctagaaatagcaagttaaaataaggctagtccgttatcaacttgaaaaagtggcaccgagtcggtgcgtttaacaaagcaccagtggtctagtggtagaatagtaccctgccacggtacagacccgggttcgattcccggctggtgcaccattggtccaagtgctattgttttagagctagaaatagcaagttaaaataaggctagtccgttatcaacttgaaaaagtggcaccgagtcggtgcgtttaacaaagcaccagtggtctagtggtagaatagtaccctgccacggtacagacccgggttcgattcccggctggtgcaattctcgacggaaagatgtagttttagagctagaaatagcaagttaaaataaggctagtccgttatcaacttgaaaaagtggcaccgagtcggtgcgtttaacaaagcaccagtggtctagtggtagaatagtaccctgccacggtacagacccgggttcgattcccggctggtgcaaaaactaggccatccatggagttttagagctagaaatagcaagttaaaataaggctagtccgttatcaacttgaaaaagtggcaccgagtcggtgcgtttaaacaaacaaactttttttaaaccaccccgtgtcaacgcggc

SEQ ID NO: 52 - protein, 130 aa, Artificial Sequence
  Synthetic Construct
MASNFTQFVLVDNGGTGDVTVAPSNFANGVAEWISSNSRSQAYKVTCSVRQSSAQKRKYTIKVEVPKVATQTVGGVELPVAAWRSYLNMELTIPIFATNSDCELIVKAMQGLLKDGNPIPSAIAANSGIY

SEQ ID NO: 53 - protein, 247 aa, Artificial Sequence
  Synthetic Construct
MGPDIVMTQSPSSLSASVGDRVTITCRSSTGAVTTSNYASWVQEKPGKLFKGLIGGTNNRAPGVPSRFSGSLIGDKATLTISSLQPEDFATYFCALWYSNHWVFGQGTKVELKRGGGGSGGGGSGGGGSSGGGSEVKLLESGGGLVQPGGSLKLSCAVSGFSLTDYGVNWVRQAPGRGLEWIGVIWGDGITDYNSALKDRFIISKDNGKNTVYLQMSKVRSDDTALYYCVTGLFDYWGQGTLVTVSS

SEQ ID NO: 54 - DNA, 15526 bp, Artificial Sequence
  Synthetic Construct
  misc_feature 157, 158, 159, 160, 161, 162, 163, 164, 165, 166, 167, 168,169, 170, 171, 172, 173, 174, 175, 176: n = A,T,C or G
ggtttcagaattcaaaaaaagcaccgactcggtgccacttggccctgcagacatgggtgatcctcatgttggccaagttgataacggactagccttattttaacttgctaggccctgcagacatgggtgatcctcatgttggcctagctctaaaacnnnnnnnnnnnnnnnnnnnncaatcactacttcgactctagctgtatataaactcagcttcgttttcttatctaagcgatgtgggacttttgaagattgttttcaacttaaatgggcctatataagaaatactattgttctttcccatataaatgggcctgcttctcttctttcagattcccaggggccttttgaagattatcttcatatcttaagaatgaagatgttttattcaatcaaattcttgaaggttcgatgcctaatcattctaatcctgggacaaactatgaaacaagatacaaaaactccgaatggaaagttaaaaagaagaaaacgaaagctacggttcaagaaaatgtaagctgataaacaaaaaaaaactgtatgaacgaagaagaagaaaaaaagctaagaagaaatgatgtattgtgcggaaggcaagtcgagtttccgttgttcaacgaaagcttaaacctcgtcgcaaaattcgccctggacccgcccaacgatttgtcgtcactgtcaaggtttgacctgcacttcatttggggcccacatacaccaaaaaaatgctgcataattctcggggcagcaagtcggttacccggccgccgtgctggaccgggttgaatggtgcccgtaactttcggtagagcggacggccaatactcaacttcaaggaatctcacccatgcgcgccggcggggaaccggagttcccttcagtgagcgttattagttcgccgctcggtgtgtcgtagatactagcccctggggcacttttgaaatttgaataagatttatgtaatcagtcttttaggtttgaccggttctgccgctttttttaaaattggatttgtaataataaaacgcaattgtttgttattgtggcgctctatcatagatgtcgctataaacctattcagcacaatatattgttttcattttaatattgtacatataagtagtagggtacaatcagtaaattgaacggagaatattattcataaaaatacgatagtaacgggtgatatattcattagaatgaaccgaaaccggcggtaaggatctgagctacacatgctcaggttttttacaacgtgcacaacagaattgaaagcaaatatcatgcgatcataggcgtctcgcatatctcattaaagcaggactctagggactagtcccgggtcttaattaactctctagactcacctaggagctccaccgcggtggcggccgctctagaactagttaattaagaattatcgaaccactttgtacaagaaagctgggcccatgaggccattaatcagacccaatggttatagggccccgcaacgtgtgtgagagcataaggggacacggtgacaacattgtcatgggttaatgttaatgctttatgagaaggaatttggttcaattcatttacttcagaggactgttctggaccttcattagctgcctggtctttttgctctgaggccttcattttcttattcttagcttctttagcctcaaacttaatcttgtttagttcaaaaccatgttggggcttatttaggtttttgtgctggtaaaagacaagggagaggcgggttggatgattacggttggggtgctcaacaggagtggtagcgtgcagctctcgccgggcacactcaatcaaaaccgagccgtgagcaggtgcgatggccaccccaccaatatttgcatccaaaaagatgtgctcactgtctgaccaatactcatcaatgtggggcaatttctcctcagcaggtgacagggggtcatcagataggggttcgtctgatggaggctcatctgcttcagaatgctgctcatcttcttccattggagaagaggcaaggtcttgaggagaggtgaggaaggagggctggtggtttggctgatgaggcgttagcggctcagtcacaccagtggaaggctcagaattaatgaggggctccatcacaggagcagacagggtggggagaggagccacttcgccaagctgtgaaatgccagggccatcagcagctgcagcattggcaccactgagtcttcccgaaggcatcgtacagtggggagtgctgcttctttctgaaaacccgcatgaggctgttgcgtcattcttcagtggagctggtgtggctgaagcagtcttcggggaccaggagaagcctggagatgcctctttcactgggtgaggagcggatggcatcagcgaataagttttagtgttgtctgaactttttaagataaaatggggttcggtttcactttttacttcaggttgcacggtctcagtgttactccctaaggttggcagtgacgaaggcttactgttgtttgttgttgttgagttattcttccgcttgattcggggaataggtttcttttccactgcccttatcttatgtgcaagaacctctgtcatcatcgcagccctcttctttccagaacggggaacaggctgagtgaaacacgttctttttttgcggcggggtgccaggacctcgatggccccagatttgatcttggcttccattccttccttggagccaaactcatctgtgtctgaaagcttataaagaggtagcacatggagctgctcatcttgaggaataacacccaaagagcggttatcttctcgagttaaggtacaaaccacagtgcttccattattcatgttgtgaatgtccctgtggggatgagcacagaagtccaggcaagcagtgaccccagagaagggtcgaccttccttgctgccaagccgacattctcgggcaacattttcatattccacctgattttggtaagctactggagcatactgcttataaattggagctaatcgtgtagccaaactctgtaagttatcttcaaggtttttttcatgtaagggagagcttggatcaattctaaatcttctggggcttgggcttctaccaaacttacagccattaaagtacatactccatgaacagccaaaagagaatgaagctccacaagtctctggatcaattccttgacatgtacaggtacgattttcattgagggtgcatcttctgtcggtagggtgcccattgtatgactttagattctctgtgagctctgtgtatagccggtcggccattggaagagggatgccatcccacaccatgatgagcaccaccatcacagcagttggacagtggtggcctgtacgctgccggaccaaacaaagaactttttcttcatcactgcttcttcttaaaacccacttagcaattggacacccatgagagcttttcccttctttaccggtgtacactactatttctatccttattgcgtttcctttttgaccatacctattctccatgatttccctgacagcagcaacacttggtcctgccccaaggtgtgtataatatgggcctttgtctttttgtataactcgatcaagacagctgcaggtgggcagggatccggttatatctccttctggccttgacggcccttcagcttttttgtacaaacttgtttgatagcttggcgcgcccttgtcatcgtcatccttgtagtctttatcgtcatcgtctttataatccgccaccttcctctttttcttaggtccgctacctcctcctccgcttcctcctcctccgcttccacctcctccagcgctgtagatacctgagttagcggcgatggcggaagggataggattaccgtctttgaggagcccctgcattgccttcacgatgagttcacagtcagaattggtagcgaaaattgggatagtgagctccatgttcaggtaggacctccaagcggcgacaggcagttcgactccgcccactgtctgggtagccactttggggacctccaccttgatggtatactttctcttctgggcactagactgcctgacgctgcatgtcaccttgtaggcctggctccgtgagttggagctgatccactctgccaccccattagcgaaattagaaggagccactgtcacatcccctgtcccaccattgtccacgagcacgaactgagtaaagtttgaagccatctgttaatcagaaaaactcagattaatcgacaaattcgatcgcacaaactagaaactaacaccagatctagatagaaatcacaaatcgaagagtaattattcgacaaaactcaaattatttgaacaaatcggatgatatctatgaaaccctaatcgagaattaagatgatatctaacgatcaaacccagaaaatcgtcttcgatctaagattaacagaatctaaaccaaagaacatatacgaaattgggatcgaacgaaaacaaaatcgaagattttgagagaataaggaacacagaaatttaccttgatcacggtagagagaattgagagaaagtttttaagattttgagaaattgaaatctgaattgtgaagaagaagagctctttgggtattgttttatagaagaagaagaagaaaagacgaggacgactaggtcacgagaaagctaaggcggtgaagcaatagctaataataaaatgacacgtgtattgagcgttgtttacacgcaaagttgtttttggctaattgccttatttttaggttgaggaaaagtatttgtgctttgagttgataaacacgactcgtgtgtgccggctgcaaccactttgacgccgtttattactgactcgtcgacaaccacaatttctaacggtcgtcataagatccagccgttgagatttaacgatcgttacgatttatatttttttagcattatcgttttattttttaaatatacggtggagctgaaaattggcaataattgaaccgtgggtcccactgcattgaagcgtatttcgtattttctagaattcttcgtgctttatttcttttcctttttgtttttttttgccatttatctaatgcaagtgggcttataaaatcagtgaatttcttggaaaagtaacttctttatcgtataacatattgtgaaattatccatttcttttaattttttagtgttattggatatttttgtatgattattgatttgcataggataatgacttttgtatcaagttggtgaacaagtctcgttaaaaaaggcaagtggtttggtgactcgatttattcttgttatttaattcatatatcaatggatcttatttggggcctggtccatatttaacactcgtgttcagtccaatgaccaataatattttttcattaataacaatgtaacaagaatgatacacaaaacattctttgaataagttcgctatgaagaagggaacttatccggtcctagatcatcagttcatacaaacctccatagagttcaacatcttaaacaagaatatcctgatctgaagaatgtggaggctttagtcccttggatacttgggaggctgtggaagaacagaaacgagctggtgcttaaagggagggaatttggaaccaatgaggtattagtaaggacacaagaagatgcagatgagtggattagaaggaaagaggctcagaatgtaaggaaagcaccaaccacaacaccgtcgggacagacgagaaacatgggaagctccaccacaatcttgggttaagtgcaactttgatggggcatggccaacagaaggattaaaatgtggcttagggtgggtgcttcgcgatcatacagggaaggtgttatggttaggtgcaagagctgtggtaaaagtaagaagcgtgctggaagtagaagtggaggctcttagatgggctgtgctgtcattatcccgattcaattataggaagatcatttttgaggtggattctcagcaacttgtgtctttggttacatgaaagttatgcttgtcaagtctcaatccaattatccaagacataaagtatctacttagcaagtttgaggattttatgcttgtgcatacaagccgagaaggaaatggagtggcagatagaatagctaaggaatctctttcttttgagaattatgatctaaagttgtattctattgtaccaatttgggttaaaagctctgttgagctagactacgcaaacaagttgtaatgagttgctggcctctcttgggattgttcatcaaagtagctgtccctacacaccacaacagaatggtgttgtggagagaaagcacagacacatccttgagatggcaagggcacttaagtttcagagtggtgtacctaccaggttttggggagactgtgtcaagactgttgtatacctgatcaatagactccctactccaatcttacaaggcaaatgtccatatgaactactctatcagaaacatgccaagcttgatcacttgagagtgtttgggtgtcttgcttttgcagcaacactgcccaaaggtgacaaacttgcacctagagccaagcgaaccatcttcattggttattctgagactcaaaagggttacaggttgtatgacttggataataaggtgatcatagtgagcagggatgtagttttcagagagtttcagttccctttcaaagagtccatctcccatgaacctgatatgttcactcgagcaggttcacttagctctgaagatacagctttgcagctagtgtataatgatatttttccttccagctttcatactgatgatgatgatactccagttcttattcctgacattgtagaggccaatgaggatatcactttggggactcattctacccaaaatcatatcacttcagctgatgctgcaccttcaggccacctgcatgctcctgcagagtcagttgagtcagctgagcctgacctagcaaatgctgaatttgagcaccatactgctgtagctgatccctctctagttccagcaaacctgcacactagacctaaacgcaatgcaggtcctcccatctggctcaaggactttgtgacactgaacaaaggctctagggatgttccataccctatagccaactatgtttcctatgatcacttgcctgttcactatcaagcttatttgagtgctttctccacttatactgaacctaaatccttcaaagaagcagctcaagatgagaaatggatggaggccatgtcccttgagatacaggctcttgaggataataacacctgggagattgtccctttaccccctggtaaacagcctatagggtccaaatgggtgtacaaaattaaatacaaagctaatggtgaagttgacaggtttaaggcaaggctagtggccaagggatacactcagcaagaaggccttgactaccatgaaactttttctccagtggccaaaatggtcactgtaaaagctgtcatatctgttgctgcttccaagggctggttccttttccagatggatgtcaacaatgcttttctacaaggtgacctcatggaagaagtttatatgtctctgcctcagggttttcacagccaaggggagaccaaagtgtgcaggctgttgaatccctctatggtttaaagcaagcatcaaggcagtggaacatcaagcttaccactgtccttatgcaggctggttttatgcaaagtgcttatgatcactccttgtttaccaaaagagaggggactgaccttgtcataatcctgatttatgtggatgatctgttaataacaggcagcagcaatgttttgatttcagaagcaaaggcaaccctgcatcagcatttcaagatgaaagatttgggagaactaaaatacttcttaggcattgaggtgctgagatcagaaaagggaatcctactgaaccagaggaagtatgcactggaactgatatcaggtgttggtctgggaggctgcagaccagtgtcaaccccaatggaacagaaccaaaggctgactactgtagaatatgacaagcacttaggaaagactgatgatgcagagttagaggatgtgggttcctatcagagactggtgggaaagcttctctacttgacaatcacaaggccagatatcagctttgcagtgcaggtgctgagtcaattcatgcagcaacccaaacagtcacacctggaagcagcattgagggttgtgaagtacataaaaggttctccaggtgttaggaagcggccgcatgcatatgagtctagctcaacagagcttttaacccaaattggtacaatagaatacaactttagatcataattctcaaaagaaagagattccttagctattctatctgccactccatttccttctcggcttgtatgcacaagcataaaatcctcaaacttgctaagtagatactttatgtcttggataattggattgagacttgacaagcataactttcatgtaaccaaagacacaagttgctgagaatccacctcaaaaatgatcttcctataattgaatcgggataatgacagcacagcccatctaagagcctccacttctacttccagcacgcttcttacttttaccacagctcttgcacctaaccataacaccttccctgtatgatcgcgaagcacccaccctaagccacattttaatccttctgttggccatgccccatcaaagttgcacttaacccaagattgtggtggagcttcccatgtttctcgtctgtcccgacggtgttgtggttggtgctttccttacattctgagcctctttccttctaatccactcatctgcatcttcttgtgtccttactaatacctcattggttccaaattccctccctttaagcaccagctcgtttctgttcttccacagcctcccaagtatccaagggactaaagcctccacattcttcagatcaggatattcttgtttaagatgttgaactctatggaggtttgtatgaactgatgatctaggaccggataagttcccttcttcatagcgaacttattcaaagaatgttttgtgtatcattcttgttacattgttattaatgaaaaaatattattggtcattggactgaacacgagtgttaaatatggaccaggccccaaataagatccattgatatatgaattaaataacaagaataaatcgagtcaccaaaccacttgccttttttaacgagacttgttcaccaacttgatacaaaagtcattatcctatgcaaatcaataatcatacaaaaatatccaataacactaaaaaattaaaagaaatggataatttcacaatatgttatacgataaagaagttacttttccaagaaattcactgattttataagcccacttgcattagataaatggcaaaaaaaaacaaaaaggaaaagaaataaagcacgaagaattctagaaaatacgaaatacgcttcaatgcagtgggacccacggttcaattattgccaattttcagctccaccgtatatttaaaaaataaaacgataatgctaaaaaaatataaatcgtaacgatcgttaaatctcaacggctggatcttatgacgaccgttagaaattgtggttgtcgacgagtcagtaataaacggcgtcaaagtggttgcagccggcacacacgagtcgtgtttatcaactcaaagcacaaatacttttcctcaacctaaaaataaggcaattagccaaaaacaactttgcgtgtaaacaacgctcaatacacgtgtcattttattattagctattgcttcaccgccttagctttctcgtgacctagtcgtcctcgtcttttcttcttcttcttctataaaacaatacccaaagagctcttcttcttcacaattcagatttcaatttctcaaaatcttaaaaactttctctcaattctctctaccgtgatcaaggtaaatttctgtgttccttattctctcaaaatcttcgattttgttttcgttcgatcccaatttcgtatatgttctttggtttagattctgttaatcttagatcgaagacgattttctgggtttgatcgttagatatcatcttaattctcgattagggtttcatagatatcatccgatttgttcaaataatttgagttttgtcgaataattactcttcgatttgtgatttctatctagatctggtgttagtttctagtttgtgcgatcgaatttgtcgattaatctgagtttttctgattaacagggatcatcaacaagtttgtacaaaaaagcaggctctttaaagtatttttacaacaattaccaacaacaacaaacaacaaacaacattacaattactatttacaattacaaaaaaagttaacatggacaaaaaatacagcattgggttggccattgggacaaatagcgtgggttgggcagtcattacagacgaatacaaggttcctagcaagaagttcaaggtgttgggcaacactgacaggcactcgatcaagaaaaatctcattggtgcactccttttcgatagtggggagactgccgaagcgaccagactgaaaaggactgctagaaggcgctatacccggcgtaagaatcgcatttgctacctccaggagatattctctaacgaaatggccaaggttgatgacagcttctttcatcgcttggaggaatcattcctcgtcgaggaagacaagaaacacgagcggcatccgatctttggaaacattgttgatgaggtcgcatatcacgaaaagtaccccacgatctaccatcttcgcaagaaactggtggattcaactgacaaggctgatctgcggttgatatacctcgcacttgctcacatgatcaagttccgtggccattttcttattgagggagacctgaaccctgataattctgacgtcgataagttgttcatccagctcgtgcaaacatacaatcagctctttgaggaaaaccctatcaacgcctctggagttgatgccaaagcgatcctttccgcgaggctgtcgaagagtagaaggctggagaacttgatcgcccaacttcctggcgaaaagaaaaacggtttgttcgggaatctcattgcgctgagcttgggactcacgccaaacttcaagtctaacttcgacctcgcagaggatgctaaacttcagctgtccaaggatacttatgatgacgatcttgacaacctgttggcacaaatcggtgaccagtacgctgatttgttcctcgctgccaagaacctcagcgatgccatactcctttcagacatcctccgcgtgaacactgagattaccaaagcacctctgtctgcttccatgataaagcgttatgatgagcaccatcaagacctcactctgttgaaggcgttggttagacagcaactcccagagaagtacaaagaaatcttctttgaccaatctaagaatggctacgccggatatattgatggcggagcgtcccaggaggagttctacaagtttatcaaacctattcttgagaagatggatggtacggaggaactccttgttaaactgaatagagaggatctcttgcgcaagcaacggactttcgacaacggcagcataccgcaccagatccatctcggagagcttcacgccatccttcgccggcaggaagatttctacccctttctgaaggacaaccgtgagaagatcgaaaaaatccttactttcagaatcccttactatgtcggtccactggctagaggcaactctagatttgcttggatgacacgcaagagtgaggaaactatcaccccttggaacttcgaggaagtggttgacaagggcgcatcggctcaaagtttcattgagagaatgactaattttgataagaaccttccgaacgagaaagtcctgcccaagcattcactcctttacgagtatttcacagtgtataacgaacttacgaaggtgaaatacgttactgagggtatgcggaagccggcattcctgtcgggggaacaaaagaaagctatagtggatctgttgtttaaaactaacaggaaggttaccgtcaagcagcttaaggaggattacttcaagaaaatagaatgttttgactcggtggagatcagtggcgttgaagatagattcaacgcttcactgggaacctaccacgacctccttaagatcattaaggacaaagatttcttggataacgaggaaaatgaggacattctcgaagatatagtccttacactgacgttgtttgaggaccgtgaaatgatcgaggaaagattgaagacctatgctcatctcttcgacgataaggttatgaagcagctcaagcgtagaaggtacacaggttgggggcgtctttctagaaagctgattaatggcataagggataaacaatctggaaagacgattctggatttcctcaagtccgacggcttcgccaaccgcaattttatgcagcttatacacgacgattccctgactttcaaagaggacatccagaaggcccaagttagcggccaaggagattcacttcacgagcatatcgccaacctggcgggtagcccggcgatcaagaaagggattcttcagaccgtcaaggtcgtggatgagctggtgaaagttatgggccggcataagcccgaaaacatagtgatcgagatggcccgtgaaaatcagactacccaaaaaggacagaagaactcccgcgagcggatgaaaaggatagaggaaggcatcaaggaacttggaagccagatcctgaaggagcacccagttgaaaacacacagttgcaaaatgagaagctctatctttactatctccaaaatggtagagacatgtatgtggatcaggagttggacattaacaggctctcagactacgatgtcgacgctatcgtgccgcaatcgttccttaaggacgatagtatagataataaggtgctgactcggtcggataaaaaccgtggcaagtcggacaatgttcccagtgaggaagttgtgaagaagatgaagaactactggcgccaactgttgaatgcaaaattgatcacccagaggaagtttgacaacctcacaaaagcagagcgcggtgggctcagtgaacttgataaagctggattcattaagaggcaacttgttgagacacgccagattacgaagcacgtcgcgcagatactggattctaggatgaacaccaagtacgacgagaatgataaattgatcagagaagtgaaggttatcacattgaagtctaaactcgtgtccgattttcgcaaagacttccaattttataaggttcgggagatcaacaattatcaccatgcacatgatgcttacctcaacgccgtggttggtacggcgttgattaagaaatacccgaagctggagtctgagttcgtgtacggggattataaggtctacgacgtgaggaaaatgatcgctaagagtgagcaggaaattggtaaagccaccgcgaagtatttcttttactctaacatcatgaacttcttcaagacagagataacgttggcaaatggtgaaatacgtaagagacctctcatcgagactaacggtgaaaccggggaaatcgtttgggataaagggcgggactttgctactgttcgtaaggtcctctccatgccgcaagtgaatattgttaagaaaacagaggtccagacgggcggattctctaaggaatccatccttcccaaaagaaacagcgacaagctgattgcgaggaagaaagattgggaccctaagaaatatggtgggttcgattctccaaccgttgcctactccgtcttggtcgtggcgaaggttgagaagggtaaatctaagaaactcaaatccgtcaaggaactccttgggattactatcatggagaggtcttccttcgaaaagaatcctatcgatttccttgaggctaaaggctataaggaagtgaagaaggatctcatcatcaagctcccaaagtacagcctgtttgagttggaaaacggaaggaagcgcatgttggcatcagctggagagctccagaaagggaacgagctggccttgccttctaagtatgtgaacttcctctatcttgcgtcgcactacgagaagctgaaaggcagtccagaggacaacgaacagaaacaactttttgttgagcaacacaagcattatctggatgagattatagaacagatcagcgagttctcaaaaagagtcattcttgccgatgctaacctcgacaaggtgctctccgcatacaacaaacacagagacaagccgatcagggagcaggctgaaaatatcattcatctcttcactcttaccaacctgggtgcccccgcggcattcaagtattttgatacaacgattgaccggaaacgttacacaagcacgaaggaggtccttgatgcgaccctgattcatcaaagcataacagggctctatgagacgagaatcgatttgtcacagctcggcggagactacccgtatgacgtgcccgattacgctgccgcggcagctgagttcaagcgcgaggaacaggcccggaaggcgaaagtgaacaatgagaagaaaacagaaatcgttaaacctgagagctgctcaaacgagggagacgttaaggatcttaagaggaaagactctgaggatggcaacgaaggagaggaagaggaagctagctcaaaacctaagaaaccaaaggtggcactctcacatctccaagacattgacgacaccgaagcagaccaagaagaagaacccgggggcgcgccatgataactagagtcctgctttaatgagatatgcgagacgcctatgatcgcatgatatttgctttcaattctgttgtgcacgttgtaaaaaacctgagcatgtgtagctcagatccttaccgccggtttcggttcattctaatgaatatatcacccgttactatcgtatttttatgaataatattctccgttcaatttactgattgtaccctactacttatatgtacaatattaaaatgaaaacaatatattgtgctgaataggtttatagcgacatctatgatagagcgccacaataacaaacaattgcgttttattattacaaatccaattttaaaaaaagcggcagaaccggtcaaacctaaaagactgattacataaatcttattcaaatttcaaaagtgccccaggggctagtatctacgacacaccgagcggcgaactaataacgctcactgaagggaactccggttccccgccggcgcgcatgggtgagattccttgaagttgagtattggccgtccgctctaccgaaagttacgggcaccattcaacccggtccagcacggcggccgggtaaccgacttgctgccccgagaattatgcagcatttttttggtgtatgtgggccccaaatgaagtgcaggtcaaaccttgacagtgacgacaaatcgttgggcgggtccagggcgaattttgcgacaacatgtcgaggctcagcaggaccggcatgcaagctagcttactagtgatattctatagtgtcacctaaatctgcggc

SEQ ID NO: 55 - DNA, 163 bp, Artificial Sequence
  Synthetic Construct
  misc_feature 144, 145, 146, 147, 148, 149, 150, 151, 152, 153, 154, 155,156, 157, 158, 159, 160, 161, 162, 163: n = A,T,C or G
aaaaaaagcaccgactcggtgccacttggccctgcagacatgggtgatcctcatgttggccaagttgataacggactagccttattttaacttgctaggccctgcagacatgggtgatcctcatgttggcctagctctaaaacnnnnnnnnnnnnnnnnnnnn

SEQ ID NO: 56 - DNA, 450 bp, Artificial Sequence
  Synthetic Construct
caatcactacttcgactctagctgtatataaactcagcttcgttttcttatctaagcgatgtgggacttttgaagattgttttcaacttaaatgggcctatataagaaatactattgttctttcccatataaatgggcctgcttctcttctttcagattcccaggggccttttgaagattatcttcatatcttaagaatgaagatgttttattcaatcaaattcttgaaggttcgatgcctaatcattctaatcctgggacaaactatgaaacaagatacaaaaactccgaatggaaagttaaaaagaagaaaacgaaagctacggttcaagaaaatgtaagctgataaacaaaaaaaaactgtatgaacgaagaagaagaaaaaaagctaagaagaaatgatgtattgtgcggaaggcaagtcgagtttccgttgttcaacgaaagctt

SEQ ID NO: 57 - DNA, 746 bp, Artificial Sequence
  Synthetic Construct
aaacctcgtcgcaaaattcgccctggacccgcccaacgatttgtcgtcactgtcaaggtttgacctgcacttcatttggggcccacatacaccaaaaaaatgctgcataattctcggggcagcaagtcggttacccggccgccgtgctggaccgggttgaatggtgcccgtaactttcggtagagcggacggccaatactcaacttcaaggaatctcacccatgcgcgccggcggggaaccggagttcccttcagtgagcgttattagttcgccgctcggtgtgtcgtagatactagcccctggggcacttttgaaatttgaataagatttatgtaatcagtcttttaggtttgaccggttctgccgctttttttaaaattggatttgtaataataaaacgcaattgtttgttattgtggcgctctatcatagatgtcgctataaacctattcagcacaatatattgttttcattttaatattgtacatataagtagtagggtacaatcagtaaattgaacggagaatattattcataaaaatacgatagtaacgggtgatatattcattagaatgaaccgaaaccggcggtaaggatctgagctacacatgctcaggttttttacaacgtgcacaacagaattgaaagcaaatatcatgcgatcataggcgtctcgcatatctcattaaagcaggactctagggactagtcccgggtcttaattaactctctagactcacctagg

SEQ ID NO: 58 - DNA, 2168 bp, Artificial Sequence
  Synthetic Construct
attaatcagacccaatggttatagggccccgcaacgtgtgtgagagcataaggggacacggtgacaacattgtcatgggttaatgttaatgctttatgagaaggaatttggttcaattcatttacttcagaggactgttctggaccttcattagctgcctggtctttttgctctgaggccttcattttcttattcttagcttctttagcctcaaacttaatcttgtttagttcaaaaccatgttggggcttatttaggtttttgtgctggtaaaagacaagggagaggcgggttggatgattacggttggggtgctcaacaggagtggtagcgtgcagctctcgccgggcacactcaatcaaaaccgagccgtgagcaggtgcgatggccaccccaccaatatttgcatccaaaaagatgtgctcactgtctgaccaatactcatcaatgtggggcaatttctcctcagcaggtgacagggggtcatcagataggggttcgtctgatggaggctcatctgcttcagaatgctgctcatcttcttccattggagaagaggcaaggtcttgaggagaggtgaggaaggagggctggtggtttggctgatgaggcgttagcggctcagtcacaccagtggaaggctcagaattaatgaggggctccatcacaggagcagacagggtggggagaggagccacttcgccaagctgtgaaatgccagggccatcagcagctgcagcattggcaccactgagtcttcccgaaggcatcgtacagtggggagtgctgcttctttctgaaaacccgcatgaggctgttgcgtcattcttcagtggagctggtgtggctgaagcagtcttcggggaccaggagaagcctggagatgcctctttcactgggtgaggagcggatggcatcagcgaataagttttagtgttgtctgaactttttaagataaaatggggttcggtttcactttttacttcaggttgcacggtctcagtgttactccctaaggttggcagtgacgaaggcttactgttgtttgttgttgttgagttattcttccgcttgattcggggaataggtttcttttccactgcccttatcttatgtgcaagaacctctgtcatcatcgcagccctcttctttccagaacggggaacaggctgagtgaaacacgttctttttttgcggcggggtgccaggacctcgatggccccagatttgatcttggcttccattccttccttggagccaaactcatctgtgtctgaaagcttataaagaggtagcacatggagctgctcatcttgaggaataacacccaaagagcggttatcttctcgagttaaggtacaaaccacagtgcttccattattcatgttgtgaatgtccctgtggggatgagcacagaagtccaggcaagcagtgaccccagagaagggtcgaccttccttgctgccaagccgacattctcgggcaacattttcatattccacctgattttggtaagctactggagcatactgcttataaattggagctaatcgtgtagccaaactctgtaagttatcttcaaggtttttttcatgtaagggagagcttggatcaattctaaatcttctggggcttgggcttctaccaaacttacagccattaaagtacatactccatgaacagccaaaagagaatgaagctccacaagtctctggatcaattccttgacatgtacaggtacgattttcattgagggtgcatcttctgtcggtagggtgcccattgtatgactttagattctctgtgagctctgtgtatagccggtcggccattggaagagggatgccatcccacaccatgatgagcaccaccatcacagcagttggacagtggtggcctgtacgctgccggaccaaacaaagaactttttcttcatcactgcttcttcttaaaacccacttagcaattggacacccatgagagcttttcccttctttaccggtgtacactactatttctatccttattgcgtttcctttttgaccatacctattctccatgatttccctgacagcagcaacacttggtcctgccccaaggtgtgtataatatgggcctttgtctttttgtataactcgatcaagacagctgcaggtgggcagggatcc

SEQ ID NO: 59 - DNA, 48 bp, Artificial Sequence
  Synthetic Construct
cttgtcatcgtcatccttgtagtctttatcgtcatcgtctttataatc

SEQ ID NO: 60 - DNA, 21 bp, Artificial Sequence
  Synthetic Construct
caccttcctctttttcttagg

SEQ ID NO: 61 - DNA, 45 bp, Artificial Sequence
  Synthetic Construct
gctacctcctcctccgcttcctcctcctccgcttccacctcctcc

SEQ ID NO: 62 - DNA, 390 bp, Artificial Sequence
  Synthetic Construct
gtagatacctgagttagcggcgatggcggaagggataggattaccgtctttgaggagcccctgcattgccttcacgatgagttcacagtcagaattggtagcgaaaattgggatagtgagctccatgttcaggtaggacctccaagcggcgacaggcagttcgactccgcccactgtctgggtagccactttggggacctccaccttgatggtatactttctcttctgggcactagactgcctgacgctgcatgtcaccttgtaggcctggctccgtgagttggagctgatccactctgccaccccattagcgaaattagaaggagccactgtcacatcccctgtcccaccattgtccacgagcacgaactgagtaaagtttgaagccat

SEQ ID NO: 63 - DNA, 1990 bp, Artificial Sequence
  Synthetic Construct
ctgttaatcagaaaaactcagattaatcgacaaattcgatcgcacaaactagaaactaacaccagatctagatagaaatcacaaatcgaagagtaattattcgacaaaactcaaattatttgaacaaatcggatgatatctatgaaaccctaatcgagaattaagatgatatctaacgatcaaacccagaaaatcgtcttcgatctaagattaacagaatctaaaccaaagaacatatacgaaattgggatcgaacgaaaacaaaatcgaagattttgagagaataaggaacacagaaatttaccttgatcacggtagagagaattgagagaaagtttttaagattttgagaaattgaaatctgaattgtgaagaagaagagctctttgggtattgttttatagaagaagaagaagaaaagacgaggacgactaggtcacgagaaagctaaggcggtgaagcaatagctaataataaaatgacacgtgtattgagcgttgtttacacgcaaagttgtttttggctaattgccttatttttaggttgaggaaaagtatttgtgctttgagttgataaacacgactcgtgtgtgccggctgcaaccactttgacgccgtttattactgactcgtcgacaaccacaatttctaacggtcgtcataagatccagccgttgagatttaacgatcgttacgatttatatttttttagcattatcgttttattttttaaatatacggtggagctgaaaattggcaataattgaaccgtgggtcccactgcattgaagcgtatttcgtattttctagaattcttcgtgctttatttcttttcctttttgtttttttttgccatttatctaatgcaagtgggcttataaaatcagtgaatttcttggaaaagtaacttctttatcgtataacatattgtgaaattatccatttcttttaattttttagtgttattggatatttttgtatgattattgatttgcataggataatgacttttgtatcaagttggtgaacaagtctcgttaaaaaaggcaagtggtttggtgactcgatttattcttgttatttaattcatatatcaatggatcttatttggggcctggtccatatttaacactcgtgttcagtccaatgaccaataatattttttcattaataacaatgtaacaagaatgatacacaaaacattctttgaataagttcgctatgaagaagggaacttatccggtcctagatcatcagttcatacaaacctccatagagttcaacatcttaaacaagaatatcctgatctgaagaatgtggaggctttagtcccttggatacttgggaggctgtggaagaacagaaacgagctggtgcttaaagggagggaatttggaaccaatgaggtattagtaaggacacaagaagatgcagatgagtggattagaaggaaagaggctcagaatgtaaggaaagcaccaaccacaacaccgtcgggacagacgagaaacatgggaagctccaccacaatcttgggttaagtgcaactttgatggggcatggccaacagaaggattaaaatgtggcttagggtgggtgcttcgcgatcatacagggaaggtgttatggttaggtgcaagagctgtggtaaaagtaagaagcgtgctggaagtagaagtggaggctcttagatgggctgtgctgtcattatcccgattcaattataggaagatcatttttgaggtggattctcagcaacttgtgtctttggttacatgaaagttatgcttgtcaagtctcaatccaattatccaagacataaagtatctacttagcaagtttgaggattttatgcttgtgcatacaagccgagaaggaaatggagtggcagatagaatagctaaggaatctctttcttttgagaattatgatctaaagttgtattctattgtaccaatttgggttaaaagctctgttgagctagactacgc

SEQ ID NO: 64 - DNA, 2022 bp, Artificial Sequence
  Synthetic Construct
aaacaagttgtaatgagttgctggcctctcttgggattgttcatcaaagtagctgtccctacacaccacaacagaatggtgttgtggagagaaagcacagacacatccttgagatggcaagggcacttaagtttcagagtggtgtacctaccaggttttggggagactgtgtcaagactgttgtatacctgatcaatagactccctactccaatcttacaaggcaaatgtccatatgaactactctatcagaaacatgccaagcttgatcacttgagagtgtttgggtgtcttgcttttgcagcaacactgcccaaaggtgacaaacttgcacctagagccaagcgaaccatcttcattggttattctgagactcaaaagggttacaggttgtatgacttggataataaggtgatcatagtgagcagggatgtagttttcagagagtttcagttccctttcaaagagtccatctcccatgaacctgatatgttcactcgagcaggttcacttagctctgaagatacagctttgcagctagtgtataatgatatttttccttccagctttcatactgatgatgatgatactccagttcttattcctgacattgtagaggccaatgaggatatcactttggggactcattctacccaaaatcatatcacttcagctgatgctgcaccttcaggccacctgcatgctcctgcagagtcagttgagtcagctgagcctgacctagcaaatgctgaatttgagcaccatactgctgtagctgatccctctctagttccagcaaacctgcacactagacctaaacgcaatgcaggtcctcccatctggctcaaggactttgtgacactgaacaaaggctctagggatgttccataccctatagccaactatgtttcctatgatcacttgcctgttcactatcaagcttatttgagtgctttctccacttatactgaacctaaatccttcaaagaagcagctcaagatgagaaatggatggaggccatgtcccttgagatacaggctcttgaggataataacacctgggagattgtccctttaccccctggtaaacagcctatagggtccaaatgggtgtacaaaattaaatacaaagctaatggtgaagttgacaggtttaaggcaaggctagtggccaagggatacactcagcaagaaggccttgactaccatgaaactttttctccagtggccaaaatggtcactgtaaaagctgtcatatctgttgctgcttccaagggctggttccttttccagatggatgtcaacaatgcttttctacaaggtgacctcatggaagaagtttatatgtctctgcctcagggttttcacagccaaggggagaccaaagtgtgcaggctgttgaatccctctatggtttaaagcaagcatcaaggcagtggaacatcaagcttaccactgtccttatgcaggctggttttatgcaaagtgcttatgatcactccttgtttaccaaaagagaggggactgaccttgtcataatcctgatttatgtggatgatctgttaataacaggcagcagcaatgttttgatttcagaagcaaaggcaaccctgcatcagcatttcaagatgaaagatttgggagaactaaaatacttcttaggcattgaggtgctgagatcagaaaagggaatcctactgaaccagaggaagtatgcactggaactgatatcaggtgttggtctgggaggctgcagaccagtgtcaaccccaatggaacagaaccaaaggctgactactgtagaatatgacaagcacttaggaaagactgatgatgcagagttagaggatgtgggttcctatcagagactggtgggaaagcttctctacttgacaatcacaaggccagatatcagctttgcagtgcaggtgctgagtcaattcatgcagcaacccaaacagtcacacctggaagcagcattgagggttgtgaagtacataaaaggttctccaggtgttaggaa

SEQ ID NO: 65 - DNA, 1986 bp, Artificial Sequence
  Synthetic Construct
agtctagctcaacagagcttttaacccaaattggtacaatagaatacaactttagatcataattctcaaaagaaagagattccttagctattctatctgccactccatttccttctcggcttgtatgcacaagcataaaatcctcaaacttgctaagtagatactttatgtcttggataattggattgagacttgacaagcataactttcatgtaaccaaagacacaagttgctgagaatccacctcaaaaatgatcttcctataattgaatcgggataatgacagcacagcccatctaagagcctccacttctacttccagcacgcttcttacttttaccacagctcttgcacctaaccataacaccttccctgtatgatcgcgaagcacccaccctaagccacattttaatccttctgttggccatgccccatcaaagttgcacttaacccaagattgtggtggagcttcccatgtttctcgtctgtcccgacggtgttgtggttggtgctttccttacattctgagcctctttccttctaatccactcatctgcatcttcttgtgtccttactaatacctcattggttccaaattccctccctttaagcaccagctcgtttctgttcttccacagcctcccaagtatccaagggactaaagcctccacattcttcagatcaggatattcttgtttaagatgttgaactctatggaggtttgtatgaactgatgatctaggaccggataagttcccttcttcatagcgaacttattcaaagaatgttttgtgtatcattcttgttacattgttattaatgaaaaaatattattggtcattggactgaacacgagtgttaaatatggaccaggccccaaataagatccattgatatatgaattaaataacaagaataaatcgagtcaccaaaccacttgccttttttaacgagacttgttcaccaacttgatacaaaagtcattatcctatgcaaatcaataatcatacaaaaatatccaataacactaaaaaattaaaagaaatggataatttcacaatatgttatacgataaagaagttacttttccaagaaattcactgattttataagcccacttgcattagataaatggcaaaaaaaaacaaaaaggaaaagaaataaagcacgaagaattctagaaaatacgaaatacgcttcaatgcagtgggacccacggttcaattattgccaattttcagctccaccgtatatttaaaaaataaaacgataatgctaaaaaaatataaatcgtaacgatcgttaaatctcaacggctggatcttatgacgaccgttagaaattgtggttgtcgacgagtcagtaataaacggcgtcaaagtggttgcagccggcacacacgagtcgtgtttatcaactcaaagcacaaatacttttcctcaacctaaaaataaggcaattagccaaaaacaactttgcgtgtaaacaacgctcaatacacgtgtcattttattattagctattgcttcaccgccttagctttctcgtgacctagtcgtcctcgtcttttcttcttcttcttctataaaacaatacccaaagagctcttcttcttcacaattcagatttcaatttctcaaaatcttaaaaactttctctcaattctctctaccgtgatcaaggtaaatttctgtgttccttattctctcaaaatcttcgattttgttttcgttcgatcccaatttcgtatatgttctttggtttagattctgttaatcttagatcgaagacgattttctgggtttgatcgttagatatcatcttaattctcgattagggtttcatagatatcatccgatttgttcaaataatttgagttttgtcgaataattactcttcgatttgtgatttctatctagatctggtgttagtttctagtttgtgcgatcgaatttgtcgattaatctgagtttttctgattaacag

SEQ ID NO: 66 - DNA, 115 bp, Artificial Sequence; identical to SEQ ID NO: 33
  Synthetic Construct

SEQ ID NO: 67 - DNA, 4401 bp, Artificial Sequence
  Synthetic Construct
atggacaaaaaatacagcattgggttggccattgggacaaatagcgtgggttgggcagtcattacagacgaatacaaggttcctagcaagaagttcaaggtgttgggcaacactgacaggcactcgatcaagaaaaatctcattggtgcactccttttcgatagtggggagactgccgaagcgaccagactgaaaaggactgctagaaggcgctatacccggcgtaagaatcgcatttgctacctccaggagatattctctaacgaaatggccaaggttgatgacagcttctttcatcgcttggaggaatcattcctcgtcgaggaagacaagaaacacgagcggcatccgatctttggaaacattgttgatgaggtcgcatatcacgaaaagtaccccacgatctaccatcttcgcaagaaactggtggattcaactgacaaggctgatctgcggttgatatacctcgcacttgctcacatgatcaagttccgtggccattttcttattgagggagacctgaaccctgataattctgacgtcgataagttgttcatccagctcgtgcaaacatacaatcagctctttgaggaaaaccctatcaacgcctctggagttgatgccaaagcgatcctttccgcgaggctgtcgaagagtagaaggctggagaacttgatcgcccaacttcctggcgaaaagaaaaacggtttgttcgggaatctcattgcgctgagcttgggactcacgccaaacttcaagtctaacttcgacctcgcagaggatgctaaacttcagctgtccaaggatacttatgatgacgatcttgacaacctgttggcacaaatcggtgaccagtacgctgatttgttcctcgctgccaagaacctcagcgatgccatactcctttcagacatcctccgcgtgaacactgagattaccaaagcacctctgtctgcttccatgataaagcgttatgatgagcaccatcaagacctcactctgttgaaggcgttggttagacagcaactcccagagaagtacaaagaaatcttctttgaccaatctaagaatggctacgccggatatattgatggcggagcgtcccaggaggagttctacaagtttatcaaacctattcttgagaagatggatggtacggaggaactccttgttaaactgaatagagaggatctcttgcgcaagcaacggactttcgacaacggcagcataccgcaccagatccatctcggagagcttcacgccatccttcgccggcaggaagatttctacccctttctgaaggacaaccgtgagaagatcgaaaaaatccttactttcagaatcccttactatgtcggtccactggctagaggcaactctagatttgcttggatgacacgcaagagtgaggaaactatcaccccttggaacttcgaggaagtggttgacaagggcgcatcggctcaaagtttcattgagagaatgactaattttgataagaaccttccgaacgagaaagtcctgcccaagcattcactcctttacgagtatttcacagtgtataacgaacttacgaaggtgaaatacgttactgagggtatgcggaagccggcattcctgtcgggggaacaaaagaaagctatagtggatctgttgtttaaaactaacaggaaggttaccgtcaagcagcttaaggaggattacttcaagaaaatagaatgttttgactcggtggagatcagtggcgttgaagatagattcaacgcttcactgggaacctaccacgacctccttaagatcattaaggacaaagatttcttggataacgaggaaaatgaggacattctcgaagatatagtccttacactgacgttgtttgaggaccgtgaaatgatcgaggaaagattgaagacctatgctcatctcttcgacgataaggttatgaagcagctcaagcgtagaaggtacacaggttgggggcgtctttctagaaagctgattaatggcataagggataaacaatctggaaagacgattctggatttcctcaagtccgacggcttcgccaaccgcaattttatgcagcttatacacgacgattccctgactttcaaagaggacatccagaaggcccaagttagcggccaaggagattcacttcacgagcatatcgccaacctggcgggtagcccggcgatcaagaaagggattcttcagaccgtcaaggtcgtggatgagctggtgaaagttatgggccggcataagcccgaaaacatagtgatcgagatggcccgtgaaaatcagactacccaaaaaggacagaagaactcccgcgagcggatgaaaaggatagaggaaggcatcaaggaacttggaagccagatcctgaaggagcacccagttgaaaacacacagttgcaaaatgagaagctctatctttactatctccaaaatggtagagacatgtatgtggatcaggagttggacattaacaggctctcagactacgatgtcgacgctatcgtgccgcaatcgttccttaaggacgatagtatagataataaggtgctgactcggtcggataaaaaccgtggcaagtcggacaatgttcccagtgaggaagttgtgaagaagatgaagaactactggcgccaactgttgaatgcaaaattgatcacccagaggaagtttgacaacctcacaaaagcagagcgcggtgggctcagtgaacttgataaagctggattcattaagaggcaacttgttgagacacgccagattacgaagcacgtcgcgcagatactggattctaggatgaacaccaagtacgacgagaatgataaattgatcagagaagtgaaggttatcacattgaagtctaaactcgtgtccgattttcgcaaagacttccaattttataaggttcgggagatcaacaattatcaccatgcacatgatgcttacctcaacgccgtggttggtacggcgttgattaagaaatacccgaagctggagtctgagttcgtgtacggggattataaggtctacgacgtgaggaaaatgatcgctaagagtgagcaggaaattggtaaagccaccgcgaagtatttcttttactctaacatcatgaacttcttcaagacagagataacgttggcaaatggtgaaatacgtaagagacctctcatcgagactaacggtgaaaccggggaaatcgtttgggataaagggcgggactttgctactgttcgtaaggtcctctccatgccgcaagtgaatattgttaagaaaacagaggtccagacgggcggattctctaaggaatccatccttcccaaaagaaacagcgacaagctgattgcgaggaagaaagattgggaccctaagaaatatggtgggttcgattctccaaccgttgcctactccgtcttggtcgtggcgaaggttgagaagggtaaatctaagaaactcaaatccgtcaaggaactccttgggattactatcatggagaggtcttccttcgaaaagaatcctatcgatttccttgaggctaaaggctataaggaagtgaagaaggatctcatcatcaagctcccaaagtacagcctgtttgagttggaaaacggaaggaagcgcatgttggcatcagctggagagctccagaaagggaacgagctggccttgccttctaagtatgtgaacttcctctatcttgcgtcgcactacgagaagctgaaaggcagtccagaggacaacgaacagaaacaactttttgttgagcaacacaagcattatctggatgagattatagaacagatcagcgagttctcaaaaagagtcattcttgccgatgctaacctcgacaaggtgctctccgcatacaacaaacacagagacaagccgatcagggagcaggctgaaaatatcattcatctcttcactcttaccaacctgggtgcccccgcggcattcaagtattttgatacaacgattgaccggaaacgttacacaagcacgaaggaggtccttgatgcgaccctgattcatcaaagcataacagggctctatgagacgagaatcgatttgtcacagctcggcggagactacccgtatgacgtgcccgattacgctgccgcggcagctgagttcaagcgcgaggaacaggcccggaaggcgaaagtgaacaatgagaagaaaacagaaatcgttaaacctgagagctgctcaaacgagggagacgttaaggatcttaagaggaaagactctgaggatggcaacgaaggagaggaagaggaagctagctcaaaacctaagaaaccaaaggtggcactctcacatctccaagacattgacgacaccgaagcagaccaagaagaagaacccgggggcgcgccatgataa

SEQ ID NO: 68 - DNA, 774 bp, Artificial Sequence
  Synthetic Construct
ctagagtcctgctttaatgagatatgcgagacgcctatgatcgcatgatatttgctttcaattctgttgtgcacgttgtaaaaaacctgagcatgtgtagctcagatccttaccgccggtttcggttcattctaatgaatatatcacccgttactatcgtatttttatgaataatattctccgttcaatttactgattgtaccctactacttatatgtacaatattaaaatgaaaacaatatattgtgctgaataggtttatagcgacatctatgatagagcgccacaataacaaacaattgcgttttattattacaaatccaattttaaaaaaagcggcagaaccggtcaaacctaaaagactgattacataaatcttattcaaatttcaaaagtgccccaggggctagtatctacgacacaccgagcggcgaactaataacgctcactgaagggaactccggttccccgccggcgcgcatgggtgagattccttgaagttgagtattggccgtccgctctaccgaaagttacgggcaccattcaacccggtccagcacggcggccgggtaaccgacttgctgccccgagaattatgcagcatttttttggtgtatgtgggccccaaatgaagtgcaggtcaaaccttgacagtgacgacaaatcgttgggcgggtccagggcgaattttgcgacaacatgtcgaggctcagcaggaccggcatgcaagctagcttactagtgatattctatagtgtcacctaaatctgcggc

SEQ ID NO: 69 - protein, 1465 aa, Artificial Sequence
  Synthetic Construct
MDKKYSIGLAIGTNSVGWAVITDEYKVPSKKFKVLGNTDRHSIKKNLIGALLFDSGETAEATRLKRTARRRYTRRKNRICYLQEIFSNEMAKVDDSFFHRLEESFLVEEDKKHERHPIFGNIVDEVAYHEKYPTIYHLRKKLVDSTDKADLRLIYLALAHMIKFRGHFLIEGDLNPDNSDVDKLFIQLVQTYNQLFEENPINASGVDAKAILSARLSKSRRLENLIAQLPGEKKNGLFGNLIALSLGLTPNFKSNFDLAEDAKLQLSKDTYDDDLDNLLAQIGDQYADLFLAAKNLSDAILLSDILRVNTEITKAPLSASMIKRYDEHHQDLTLLKALVRQQLPEKYKEIFFDQSKNGYAGYIDGGASQEEFYKFIKPILEKMDGTEELLVKLNREDLLRKQRTFDNGSIPHQIHLGELHAILRRQEDFYPFLKDNREKIEKILTFRIPYYVGPLARGNSRFAWMTRKSEETITPWNFEEVVDKGASAQSFIERMTNFDKNLPNEKVLPKHSLLYEYFTVYNELTKVKYVTEGMRKPAFLSGEQKKAIVDLLFKTNRKVTVKQLKEDYFKKIECFDSVEISGVEDRFNASLGTYHDLLKIIKDKDFLDNEENEDILEDIVLTLTLFEDREMIEERLKTYAHLFDDKVMKQLKRRRYTGWGRLSRKLINGIRDKQSGKTILDFLKSDGFANRNFMQLIHDDSLTFKEDIQKAQVSGQGDSLHEHIANLAGSPAIKKGILQTVKVVDELVKVMGRHKPENIVIEMARENQTTQKGQKNSRERMKRIEEGIKELGSQILKEHPVENTQLQNEKLYLYYLQNGRDMYVDQELDINRLSDYDVDAIVPQSFLKDDSIDNKVLTRSDKNRGKSDNVPSEEVVKKMKNYWRQLLNAKLITQRKFDNLTKAERGGLSELDKAGFIKRQLVETRQITKHVAQILDSRMNTKYDENDKLIREVKVITLKSKLVSDFRKDFQFYKVREINNYHHAHDAYLNAVVGTALIKKYPKLESEFVYGDYKVYDVRKMIAKSEQEIGKATAKYFFYSNIMNFFKTEITLANGEIRKRPLIETNGETGEIVWDKGRDFATVRKVLSMPQVNIVKKTEVQTGGFSKESILPKRNSDKLIARKKDWDPKKYGGFDSPTVAYSVLVVAKVEKGKSKKLKSVKELLGITIMERSSFEKNPIDFLEAKGYKEVKKDLIIKLPKYSLFELENGRKRMLASAGELQKGNELALPSKYVNFLYLASHYEKLKGSPEDNEQKQLFVEQHKHYLDEIIEQISEFSKRVILADANLDKVLSAYNKHRDKPIREQAENIIHLFTLTNLGAPAAFKYFDTTIDRKRYTSTKEVLDATLIHQSITGLYETRIDLSQLGGDYPYDVPDYAAAAAEFKREEQARKAKVNNEKKTEIVKPESCSNEGDVKDLKRKDSEDGNEGEEEEASSKPKKPKVALSHLQDIDDTEADQEEEPGGAP

SEQ ID NO: 70 - protein, 1368 aa, Artificial Sequence
  Synthetic Construct
MDKKYSIGLAIGTNSVGWAVITDEYKVPSKKFKVLGNTDRHSIKKNLIGALLFDSGETAEATRLKRTARRRYTRRKNRICYLQEIFSNEMAKVDDSFFHRLEESFLVEEDKKHERHPIFGNIVDEVAYHEKYPTIYHLRKKLVDSTDKADLRLIYLALAHMIKFRGHFLIEGDLNPDNSDVDKLFIQLVQTYNQLFEENPINASGVDAKAILSARLSKSRRLENLIAQLPGEKKNGLFGNLIALSLGLTPNFKSNFDLAEDAKLQLSKDTYDDDLDNLLAQIGDQYADLFLAAKNLSDAILLSDILRVNTEITKAPLSASMIKRYDEHHQDLTLLKALVRQQLPEKYKEIFFDQSKNGYAGYIDGGASQEEFYKFIKPILEKMDGTEELLVKLNREDLLRKQRTFDNGSIPHQIHLGELHAILRRQEDFYPFLKDNREKIEKILTFRIPYYVGPLARGNSRFAWMTRKSEETITPWNFEEVVDKGASAQSFIERMTNFDKNLPNEKVLPKHSLLYEYFTVYNELTKVKYVTEGMRKPAFLSGEQKKAIVDLLFKTNRKVTVKQLKEDYFKKIECFDSVEISGVEDRFNASLGTYHDLLKIIKDKDFLDNEENEDILEDIVLTLTLFEDREMIEERLKTYAHLFDDKVMKQLKRRRYTGWGRLSRKLINGIRDKQSGKTILDFLKSDGFANRNFMQLIHDDSLTFKEDIQKAQVSGQGDSLHEHIANLAGSPAIKKGILQTVKVVDELVKVMGRHKPENIVIEMARENQTTQKGQKNSRERMKRIEEGIKELGSQILKEHPVENTQLQNEKLYLYYLQNGRDMYVDQELDINRLSDYDVDAIVPQSFLKDDSIDNKVLTRSDKNRGKSDNVPSEEVVKKMKNYWRQLLNAKLITQRKFDNLTKAERGGLSELDKAGFIKRQLVETRQITKHVAQILDSRMNTKYDENDKLIREVKVITLKSKLVSDFRKDFQFYKVREINNYHHAHDAYLNAVVGTALIKKYPKLESEFVYGDYKVYDVRKMIAKSEQEIGKATAKYFFYSNIMNFFKTEITLANGEIRKRPLIETNGETGEIVWDKGRDFATVRKVLSMPQVNIVKKTEVQTGGFSKESILPKRNSDKLIARKKDWDPKKYGGFDSPTVAYSVLVVAKVEKGKSKKLKSVKELLGITIMERSSFEKNPIDFLEAKGYKEVKKDLIIKLPKYSLFELENGRKRMLASAGELQKGNELALPSKYVNFLYLASHYEKLKGSPEDNEQKQLFVEQHKHYLDEIIEQISEFSKRVILADANLDKVLSAYNKHRDKPIREQAENIIHLFTLTNLGAPAAFKYFDTTIDRKRYTSTKEVLDATLIHQSITGLYETRIDLSQLGGD

SEQ ID NO: 71 - protein, 7 aa, Artificial Sequence
  Synthetic Construct
YPYDVPD

SEQ ID NO: 72 - protein, 90 aa, Artificial Sequence
  Synthetic Construct
YAAAAAEFKREEQARKAKVNNEKKTEIVKPESCSNEGDVKDLKRKDSEDGNEGEEEEASSKPKKPKVALSHLQDIDDTEADQEEEPGGAP

SEQ ID NO: 73 - protein, 908 aa, Artificial Sequence
  Synthetic Construct
MASNFTQFVLVDNGGTGDVTVAPSNFANGVAEWISSNSRSQAYKVTCSVRQSSAQKRKYTIKVEVPKVATQTVGGVELPVAAWRSYLNMELTIPIFATNSDCELIVKAMQGLLKDGNPIPSAIAANSGIYSAGGGGSGGGGSGGGGSGPKKKRKVADYKDDDDKDYKDDDDKGAPSYQTSLYKKAEGPSRPEGDITGSLPTCSCLDRVIQKDKGPYYTHLGAGPSVAAVREIMENRYGQKGNAIRIEIVVYTGKEGKSSHGCPIAKWVLRRSSDEEKVLCLVRQRTGHHCPTAVMVVLIMVWDGIPLPMADRLYTELTENLKSYNGHPTDRRCTLNENRTCTCQGIDPETCGASFSFGCSWSMYFNGCKFGRSPSPRRFRIDPSSPLHEKNLEDNLQSLATRLAPIYKQYAPVAYQNQVEYENVARECRLGSKEGRPFSGVTACLDFCAHPHRDIHNMNNGSTVVCTLTREDNRSLGVIPQDEQLHVLPLYKLSDTDEFGSKEGMEAKIKSGAIEVLAPRRKKRTCFTQPVPRSGKKRAAMMTEVLAHKIRAVEKKPIPRIKRKNNSTTTNNSKPSSLPTLGSNTETVQPEVKSETEPHFILKSSDNTKTYSLMPSAPHPVKEASPGFSWSPKTASATPAPLKNDATASCGFSERSSTPHCTMPSGRLSGANAAAADGPGISQLGEVAPLPTLSAPVMEPLINSEPSTGVTEPLTPHQPNHQPSFLTSPQDLASSPMEEDEQHSEADEPPSDEPLSDDPLSPAEEKLPHIDEYWSDSEHIFLDANIGGVAIAPAHGSVLIECARRELHATTPVEHPNRNHPTRLSLVFYQHKNLNKPQHGFELNKIKFEAKEAKNKKMKASEQKDQAANEGPEQSSEVNELNQIPSHKALTLTHDNVVTVSPYALTHV

SEQ ID NO: 74 - protein, 132 aa, Artificial Sequence
  Synthetic Construct
MASNFTQFVLVDNGGTGDVTVAPSNFANGVAEWISSNSRSQAYKVTCSVRQSSAQKRKYTIKVEVPKVATQTVGGVELPVAAWRSYLNMELTIPIFATNSDCELIVKAMQGLLKDGNPIPSAIAANSGIYSA

SEQ ID NO: 75 - protein, 15 aa, Artificial Sequence
  Synthetic Construct
GGGGSGGGGSGGGGS

SEQ ID NO: 76 - protein, 9 aa, Artificial Sequence
  Synthetic Construct
GPKKKRKVA

SEQ ID NO: 77 - protein, 17 aa, Artificial Sequence
  Synthetic Construct
DYKDDDDKDYKDDDDKG

SEQ ID NO: 78 - protein, 712 aa, Artificial Sequence
  Synthetic Construct
GSLPTCSCLDRVIQKDKGPYYTHLGAGPSVAAVREIMENRYGQKGNAIRIEIVVYTGKEGKSSHGCPIAKWVLRRSSDEEKVLCLVRQRTGHHCPTAVMVVLIMVWDGIPLPMADRLYTELTENLKSYNGHPTDRRCTLNENRTCTCQGIDPETCGASFSFGCSWSMYFNGCKFGRSPSPRRFRIDPSSPLHEKNLEDNLQSLATRLAPIYKQYAPVAYQNQVEYENVARECRLGSKEGRPFSGVTACLDFCAHPHRDIHNMNNGSTVVCTLTREDNRSLGVIPQDEQLHVLPLYKLSDTDEFGSKEGMEAKIKSGAIEVLAPRRKKRTCFTQPVPRSGKKRAAMMTEVLAHKIRAVEKKPIPRIKRKNNSTTTNNSKPSSLPTLGSNTETVQPEVKSETEPHFILKSSDNTKTYSLMPSAPHPVKEASPGFSWSPKTASATPAPLKNDATASCGFSERSSTPHCTMPSGRLSGANAAAADGPGISQLGEVAPLPTLSAPVMEPLINSEPSTGVTEPLTPHQPNHQPSFLTSPQDLASSPMEEDEQHSEADEPPSDEPLSDDPLSPAEEKLPHIDEYWSDSEHIFLDANIGGVAIAPAHGSVLIECARRELHATTPVEHPNRNHPTRLSLVFYQHKNLNKPQHGFELNKIKFEAKEAKNKKMKASEQKDQAANEGPEQSSEVNELNQIPSHKALTLTHDNVVTVSPYALTHV

SEQ ID NO: 79 - DNA, 16237 bp, Artificial Sequence
  Synthetic Construct
atgcatatgagtctagctcaacagagcttttaacccaaattggtacaatagaatacaactttagatcataattctcaaaagaaagagattccttagctattctatctgccactccatttccttctcggcttgtatgcacaagcataaaatcctcaaacttgctaagtagatactttatgtcttggataattggattgagacttgacaagcataactttcatgtaaccaaagacacaagttgctgagaatccacctcaaaaatgatcttcctataattgaatcgggataatgacagcacagcccatctaagagcctccacttctacttccagcacgcttcttacttttaccacagctcttgcacctaaccataacaccttccctgtatgatcgcgaagcacccaccctaagccacattttaatccttctgttggccatgccccatcaaagttgcacttaacccaagattgtggtggagcttcccatgtttctcgtctgtcccgacggtgttgtggttggtgctttccttacattctgagcctctttccttctaatccactcatctgcatcttcttgtgtccttactaatacctcattggttccaaattccctccctttaagcaccagctcgtttctgttcttccacagcctcccaagtatccaagggactaaagcctccacattcttcagatcaggatattcttgtttaagatgttgaactctatggaggtttgtatgaactgatgatctaggaccggataagttcccttcttcatagcgaacttattcaaagaatgttttgtgtatcattcttgttacattgttattaatgaaaaaatattattggtcattggactgaacacgagtgttaaatatggaccaggccccaaataagatccattgatatatgaattaaataacaagaataaatcgagtcaccaaaccacttgccttttttaacgagacttgttcaccaacttgatacaaaagtcattatcctatgcaaatcaataatcatacaaaaatatccaataacactaaaaaattaaaagaaatggataatttcacaatatgttatacgataaagaagttacttttccaagaaattcactgattttataagcccacttgcattagataaatggcaaaaaaaaacaaaaaggaaaagaaataaagcacgaagaattctagaaaatacgaaatacgcttcaatgcagtgggacccacggttcaattattgccaattttcagctccaccgtatatttaaaaaataaaacgataatgctaaaaaaatataaatcgtaacgatcgttaaatctcaacggctggatcttatgacgaccgttagaaattgtggttgtcgacgagtcagtaataaacggcgtcaaagtggttgcagccggcacacacgagtcgtgtttatcaactcaaagcacaaatacttttcctcaacctaaaaataaggcaattagccaaaaacaactttgcgtgtaaacaacgctcaatacacgtgtcattttattattagctattgcttcaccgccttagctttctcgtgacctagtcgtcctcgtcttttcttcttcttcttctataaaacaatacccaaagagctcttcttcttcacaattcagatttcaatttctcaaaatcttaaaaactttctctcaattctctctaccgtgatcaaggtaaatttctgtgttccttattctctcaaaatcttcgattttgttttcgttcgatcccaatttcgtatatgttctttggtttagattctgttaatcttagatcgaagacgattttctgggtttgatcgttagatatcatcttaattctcgattagggtttcatagatatcatccgatttgttcaaataatttgagttttgtcgaataattactcttcgatttgtgatttctatctagatctggtgttagtttctagtttgtgcgatcgaatttgtcgattaatctgagtttttctgattaacagggatcatcaacaagtttgtacaaaaaagcaggctctttaaagtatttttacaacaattaccaacaacaacaaacaacaaacaacattacaattactatttacaattacaaaaaaagttaacatggacaagaagtacagcatcggcctggccatcggcaccaactctgtgggctgggccgtgatcaccgacgagtacaaggtgcccagcaagaaattcaaggtgctgggcaacaccgaccggcacagcatcaagaagaacctgatcggcgccctgctgttcgacagcggagaaacagccgaggccacccggctgaagagaaccgccagaagaagatacaccagacggaagaaccggatctgctatctgcaagagatcttcagcaacgagatggccaaggtggacgacagcttcttccacagactggaagagtccttcctggtggaagaggataagaagcacgagcggcaccccatcttcggcaacatcgtggacgaggtggcctaccacgagaagtaccccaccatctaccacctgagaaagaaactggtggacagcaccgacaaggccgacctgcggctgatctatctggccctggcccacatgatcaagttccggggccacttcctgatcgagggcgacctgaaccccgacaacagcgacgtggacaagctgttcatccagctggtgcagacctacaaccagctgttcgaggaaaaccccatcaacgccagcggcgtggacgccaaggccatcctgtctgccagactgagcaagagcagacggctggaaaatctgatcgcccagctgcccggcgagaagaagaatggcctgttcggcaacctgattgccctgagcctgggcctgacccccaacttcaagagcaacttcgacctggccgaggatgccaaactgcagctgagcaaggacacctacgacgacgacctggacaacctgctggcccagatcggcgaccagtacgccgacctgtttctggccgccaagaacctgtccgacgccatcctgctgagcgacatcctgagagtgaacaccgagatcaccaaggcccccctgagcgcctctatgatcaagagatacgacgagcaccaccaggacctgaccctgctgaaagctctcgtgcggcagcagctgcctgagaagtacaaagagattttcttcgaccagagcaagaacggctacgccggctacatcgatggcggagccagccaggaagagttctacaagttcatcaagcccatcctggaaaagatggacggcaccgaggaactgctcgtgaagctgaacagagaggacctgctgcggaagcagcggaccttcgacaacggcagcatcccccaccagatccacctgggagagctgcacgccattctgcggcggcaggaagatttttacccattcctgaaggacaaccgggaaaagatcgagaagatcctgaccttccgcatcccctactacgtgggccctctggccaggggaaacagcagattcgcctggatgaccagaaagagcgaggaaaccatcaccccctggaacttcgaggaagtggtggacaagggcgccagcgcccagagcttcatcgagcggatgaccaacttcgataagaacctgcccaacgagaaggtgctgcccaagcacagcctgctgtacgagtacttcaccgtgtacaacgagctgaccaaagtgaaatacgtgaccgagggaatgagaaagcccgccttcctgagcggcgagcagaaaaaagccatcgtggacctgctgttcaagaccaaccggaaagtgaccgtgaagcagctgaaagaggactacttcaagaaaatcgagtgcttcgactccgtggaaatctccggcgtggaagatcggttcaacgcctccctgggcacataccacgatctgctgaaaattatcaaggacaaggacttcctggacaatgaggaaaacgaggacattctggaagatatcgtgctgaccctgacactgtttgaggacagagagatgatcgaggaacggctgaaaacctatgcccacctgttcgacgacaaagtgatgaagcagctgaagcggcggagatacaccggctggggcaggctgagccggaagctgatcaacggcatccgggacaagcagtccggcaagacaatcctggatttcctgaagtccgacggcttcgccaacagaaacttcatgcagctgatccacgacgacagcctgacctttaaagaggacatccagaaagcccaggtgtccggccagggcgatagcctgcacgagcacattgccaatctggccggcagccccgccattaagaagggcatcctgcagacagtgaaggtggtggacgagctcgtgaaagtgatgggccggcacaagcccgagaacatcgtgatcgaaatggccagagagaaccagaccacccagaagggacagaagaacagccgcgagagaatgaagcggatcgaagagggcatcaaagagctgggcagccagatcctgaaagaacaccccgtggaaaacacccagctgcagaacgagaagctgtacctgtactacctgcagaatgggcgggatatgtacgtggaccaggaactggacatcaaccggctgtccgactacgatgtggacgctatcgtgcctcagagctttctgaaggacgactccatcgataacaaagtgctgactcggagcgacaagaaccggggcaagagcgacaacgtgccctccgaagaggtcgtgaagaagatgaagaactactggcgccagctgctgaatgccaagctgattacccagaggaagttcgacaatctgaccaaggccgagagaggcggcctgagcgaactggataaggccggcttcatcaagagacagctggtggaaacccggcagatcacaaagcacgtggcacagatcctggactcccggatgaacactaagtacgacgagaacgacaaactgatccgggaagtgaaagtgatcaccctgaagtccaagctggtgtccgatttccggaaggatttccagttttacaaagtgcgcgagatcaacaactaccaccacgcccacgacgcctacctgaacgccgtcgtgggaaccgccctgatcaaaaagtaccctaagctggaaagcgagttcgtgtacggcgactacaaggtgtacgacgtgcggaagatgatcgccaagagcgagcaggaaatcggcaaggctaccgccaagtacttcttctacagcaacatcatgaactttttcaagaccgagattaccctggccaacggcgagatccggaagcggcctctgatcgagacaaacggcgaaacaggcgagatcgtgtgggataagggccgggactttgccaccgtgcggaaagtgctgtctatgccccaagtgaatatcgtgaaaaagaccgaggtgcagacaggcggcttcagcaaagagtctatcctgcccaagaggaacagcgacaagctgatcgccagaaagaaggactgggaccctaagaagtacggcggcttcgacagccccaccgtggcctattctgtgctggtggtggccaaagtggaaaagggcaagtccaagaaactgaagagtgtgaaagagctgctggggatcaccatcatggaaagaagcagcttcgagaagaatcccatcgactttctggaagccaagggctacaaagaagtgaaaaaggacctgatcatcaagctgcctaagtactccctgttcgagctggaaaacggccggaagagaatgctggcctctgccggcgaactgcagaagggaaacgaactggccctgccctccaaatatgtgaacttcctgtacctggccagccactatgagaagctgaagggctcccccgaggataatgagcagaaacagctgtttgtggaacagcacaaacactacctggacgagatcatcgagcagatcagcgagttctccaagagagtgatcctggccgacgctaatctggacaaggtgctgagcgcctacaacaagcacagagacaagcctatcagagagcaggccgagaatatcatccacctgtttaccctgaccaatctgggagcccctgccgccttcaagtactttgacaccaccatcgaccggaagaggtacaccagcaccaaagaggtgctggacgccaccctgatccaccagagcatcaccggcctgtacgagacacggatcgacctgtctcagctgggaggcgacgcctatccctatgacgtgcccgattatgccagcctgggcagcggctcccccaagaaaaaacgcaaggtggaagatcctaagaaaaagcggaaagtggacggcattggtagtgggagcaacggcagcagcggatccaacggtccgactgacgccgcggaagaggagcttctgagcaaaaactatcacctcgaaaacgaggttgcgcgactgaagaaaggaagcgggtccggtggaagtggctccggatctggaggttctggcagcggaggtagcggcagtggcgaagagctccttagtaagaactatcatctggaaaatgaggtagcgcgcttaaagaaagggtcgggaagtggcggcagcggaagtgggagtggagggagcggttctggcggttccggcagtggagaggagttgctgtctaagaactaccacttagaaaacgaagtcgcacggctaaaaaaaggttccggctccggcggctccggttctggaagcgggggctcgggatcaggtggatctggatcaggagaggaattgctttccaaaaactaccaccttgagaatgaggtggccaggttaaagaaggggagcggctcggggggtagtggatcggggtcgggcgggtcaggaagcggtggtagcggatctggggaggagctgctctcgaagaattaccatttggagaacgaagtggcgagactaaagaagggaagcggtagtggtggttcagggtctggttcaggtggcagtgggtctgggggctcagggtccgggtagcccgggggcgcgccatgataactagagtcctgctttaatgagatatgcgagacgcctatgatcgcatgatatttgctttcaattctgttgtgcacgttgtaaaaaacctgagcatgtgtagctcagatccttaccgccggtttcggttcattctaatgaatatatcacccgttactatcgtatttttatgaataatattctccgttcaatttactgattgtaccctactacttatatgtacaatattaaaatgaaaacaatatattgtgctgaataggtttatagcgacatctatgatagagcgccacaataacaaacaattgcgttttattattacaaatccaattttaaaaaaagcggcagaaccggtcaaacctaaaagactgattacataaatcttattcaaatttcaaaagtgccccaggggctagtatctacgacacaccgagcggcgaactaataacgttcactgaagggaactccggttccccgccggcgcgcatgggtgagattccttgaagttgagtattggccgtccgctctaccgaaagttacgggcaccattcaacccggtccagcacggcggccgggtaaccgacttgctgccccgagaattatgcagcatttttttggtgtatgtgggccccaaatgaagtgcaggtcaaaccttgacagtgacgacaaatcgttgggcgggtccagggcgaattttgcgacaacatgtcgaggctcagcaggaccggcatgcaagctagcttactagtgatattctatagtgtcacctaaatctgcggccgcttcctaacacctggagaaccttttatgtacttcacaaccctcaatgctgcttccaggtgtgactgtttgggttgctgcatgaattgactcagcacctgcactgcaaagctgatatctggccttgtgattgtcaagtagagaagctttcccaccagtctctgataggatcccacatcctctaactctgcatcatcagtctttcctaagtgcttgtcatattctacagtagtcagcctttggttctgttccattggggttgacactggtctgcagcctcccagaccaacacctgatatcagttccagtgcatacttcctctggttcagtaggattcccttttctgatctcagcacctcaatgcctaagaagtattttagttctcccaaatctttcatcttgaaatgctgatgcagggttgcctttgcttctgaaatcaaaacattgctgctgcctgttattaacagatcatccacataaatcaggattatgacaaggtcagtcccctctcttttggtaaacaaggagtgatcataagcactttgcataaaaccagcctgcataaggacagtggtaagcttgatgttccactgccttgatgcttgctttaaaccatagagggattcaacagcctgcacactttggtctccccttggctgtgaaaaccctgaggcagagacatataaacttcttccatgaggtcaccttgtagaaaagcattgttgacatccatctggaaaaggaaccagcccttggaagcagcaacagatatgacagcttttacagtgaccattttggccactggagaaaaagtttcatggtagtcaaggccttcttgctgagtgtatcccttggccactagccttgccttaaacctgtcaacttcaccattagctttgtatttaattttgtacacccatttggaccctataggctgtttaccagggggtaaagggacaatctcccaggtgttattatcctcaagagcctgtatctcaagggacatggcctccatccatttctcatcttgagctgcttctttgaaggatttaggttcagtataagtggagaaagcactcaaataagcttgatagtgaacaggcaagtgatcataggaaacatagttggctatagggtatggaacatccctagagcctttgttcagtgtcacaaagtccttgagccagatgggaggacctgcattgcgtttaggtctagtgtgcaggtttgctggaactagagagggatcagctacagcagtatggtgctcaaattcagcatttgctaggtcaggctcagctgactcaactgactctgcaggagcatgcaggtggcctgaaggtgcagcatcagctgaagtgatatgattttgggtagaatgagtccccaaagtgatatcctcattggcctctacaatgtcaggaataagaactggagtatcatcatcatcagtatgaaagctggaaggaaaaatatcattatacactagctgcaaagctgtatcttcagagctaagtgaacctgctcgagtgaacatatcaggttcatgggagatggactctttgaaagggaactgaaactctctgaaaactacatccctgctcactatgatcaccttattatccaagtcatacaacctgtaacccttttgagtctcagaataaccaatgaagatggttcgcttggctctaggtgcaagtttgtcacctttgggcagtgttgctgcaaaagcaagacacccaaacactctcaagtgatcaagcttggcatgtttctgatagagtagttcatatggacatttgccttgtaagattggagtagggagtctattgatcaggtatacaacagtcttgacacagtctccccaaaacctggtaggtacaccactctgaaacttaagtgcccttgccatctcaaggatgtgtctgtgctttctctccacaacaccattctgttgtggtgtgtagggacagctactttgatgaacaatcccaagagaggccagcaactcattacaacttgtttcctaggatgcatatgagtctagctcaacagagcttttaacccaaattggtacaatagaatacaactttagatcataattctcaaaagaaagagattccttagctattctatctgccactccatttccttctcggcttgtatgcacaagcataaaatcctcaaacttgctaagtagatactttatgtcttggataattggattgagacttgacaagcataactttcatgtaaccaaagacacaagttgctgagaatccacctcaaaaatgatcttcctataattgaatcgggataatgacagcacagcccatctaagagcctccacttctacttccagcacgcttcttacttttaccacagctcttgcacctaaccataacaccttccctgtatgatcgcgaagcacccaccctaagccacattttaatccttctgttggccatgccccatcaaagttgcacttaacccaagattgtggtggagcttcccatgtttctcgtctgtcccgacggtgttgtggttggtgctttccttacattctgagcctctttccttctaatccactcatctgcatcttcttgtgtccttactaatacctcattggttccaaattccctccctttaagcaccagctcgtttctgttcttccacagcctcccaagtatccaagggactaaagcctccacattcttcagatcaggatattcttgtttaagatgttgaactctatggaggtttgtatgaactgatgatctaggaccggataagttcccttcttcatagcgaacttattcaaagaatgttttgtgtatcattcttgttacattgttattaatgaaaaaatattattggtcattggactgaacacgagtgttaaatatggaccaggccccaaataagatccattgatatatgaattaaataacaagaataaatcgagtcaccaaaccacttgccttttttaacgagacttgttcaccaacttgatacaaaagtcattatcctatgcaaatcaataatcatacaaaaatatccaataacactaaaaaattaaaagaaatggataatttcacaatatgttatacgataaagaagttacttttccaagaaattcactgattttataagcccacttgcattagataaatggcaaaaaaaaacaaaaaggaaaagaaataaagcacgaagaattctagaaaatacgaaatacgcttcaatgcagtgggacccacggttcaattattgccaattttcagctccaccgtatatttaaaaaataaaacgataatgctaaaaaaatataaatcgtaacgatcgttaaatctcaacggctggatcttatgacgaccgttagaaattgtggttgtcgacgagtcagtaataaacggcgtcaaagtggttgcagccggcacacacgagtcgtgtttatcaactcaaagcacaaatacttttcctcaacctaaaaataaggcaattagccaaaaacaactttgcgtgtaaacaacgctcaatacacgtgtcattttattattagctattgcttcaccgccttagctttctcgtgacctagtcgtcctcgtcttttcttcttcttcttctataaaacaatacccaaagagctcttcttcttcacaattcagatttcaatttctcaaaatcttaaaaactttctctcaattctctctaccgtgatcaaggtaaatttctgtgttccttattctctcaaaatcttcgattttgttttcgttcgatcccaatttcgtatatgttctttggtttagattctgttaatcttagatcgaagacgattttctgggtttgatcgttagatatcatcttaattctcgattagggtttcatagatatcatccgatttgttcaaataatttgagttttgtcgaataattactcttcgatttgtgatttctatctagatctggtgttagtttctagtttgtgcgatcgaatttgtcgattaatctgagtttttctgattaacacctagggtttatgggccccgacatcgtgatgacccagagccccagcagcctgagcgccagcgtgggcgaccgcgtgaccatcacctgccgcagcagcaccggcgccgtgaccaccagcaactacgccagctgggtgcaggagaagcccggcaagctgttcaagggcctgatcggcggcaccaacaaccgcgcccccggcgtgcccagccgcttcagcggcagcctgatcggcgacaaggccaccctgaccatcagcagcctgcagcccgaggacttcgccacctacttctgcgccctgtggtacagcaaccactgggtgttcggccagggcaccaaggtggagctgaagcgcggcggcggcggcagcggcggcggcggcagcggcggcggcggcagcagcggcggcggcagcgaggtgaagctgctggagagcggcggcggcctggtgcagcccggcggcagcctgaagctgagctgcgccgtgagcggcttcagcctgaccgactacggcgtgaactgggtgcgccaggcccccggccgcggcctggagtggatcggcgtgatctggggcgacggcatcaccgactacaacagcgccctgaaggaccgcttcatcatcagcaaggacaacggcaagaacaccgtgtacctgcagatgagcaaggtgcgcagcgacgacaccgccctgtactactgcgtgaccggcctgttcgactactggggccagggcaccctggtgaccgtgagcagctacccatacgatgttccagattacgctggtggaggcggaggttctgggggaggaggtagtggcggtggtggttcaggaggcggcggaagcttggatccaggtggaggtggaagcggtagcaaaggagaagaacttttcactggagttgtcccaattcttgttgaattagatggtgatgttaatgggcacaaattttctgtccgtggagagggtgaaggtgatgctacaaacggaaaactcacccttaaatttatttgcactactggaaaactacctgttccgtggccaacacttgtcactactctgacctatggtgttcaatgcttttcccgttatccggatcacatgaaacggcatgactttttcaagagtgccatgcccgaaggttatgtacaggaacgcactatatctttcaaagatgacgggacctacaagacgcgtgctgaagtcaagtttgaaggtgatacccttgttaatcgtatcgagttaaagggtattgattttaaagaagatggaaacattcttggacacaaactcgagtacaactttaactcacacaatgtatacatcacggcagacaaacaaaagaatggaatcaaagctaacttcaaaattcgccacaacgttgaagatggttccgttcaactagcagaccattatcaacaaaatactccaattggcgatggccctgtccttttaccagacaaccattacctgtcgacacaatctgtcctttcgaaagatcccaacgaaaagcgtgaccacatggtccttcttgagtttgtaactgctgctgggattacacatggcatggatgagctctacaaaggtggaggtcggaccggtcgtacgtatccctatgacgtgcccgattatgccagcctgggcagcggcgctcccaagaaaaaacgcaaggtggaagctcctaagaaaaagcggaaagtgggcggtggcggatccgggctgcccacctgcagctgtcttgatcgagttatacaaaaagacaaaggcccatattatacacaccttggggcaggaccaagtgttgctgctgtcagggaaatcatggagaataggtatggtcaaaaaggaaacgcaataaggatagaaatagtagtgtacaccggtaaagaagggaaaagctctcatgggtgtccaattgctaagtgggttttaagaagaagcagtgatgaagaaaaagttctttgtttggtccggcagcgtacaggccaccactgtccaactgctgtgatggtggtgctcatcatggtgtgggatggcatccctcttccaatggccgaccggctatacacagagctcacagagaatctaaagtcatacaatgggcaccctaccgacagaagatgcaccctcaatgaaaatcgtacctgtacatgtcaaggaattgatccagagacttgtggagcttcattctcttttggctgttcatggagtatgtactttaatggctgtaagtttggtagaagcccaagccccagaagatttagaattgatccaagctctcccttacatgaaaaaaaccttgaagataacttacagagtttggctacacgattagctccaatttataagcagtatgctccagtagcttaccaaaatcaggtggaatatgaaaatgttgcccgagaatgtcggcttggcagcaaggaaggtcgacccttctctggggtcactgcttgcctggacttctgtgctcatccccacagggacattcacaacatgaataatggaagcactgtggtttgtaccttaactcgagaagataaccgctctttgggtgttattcctcaagatgagcagctccatgtgctacctctttataagctttcagacacagatgagtttggctccaaggaaggaatggaagccaagatcaaatctggggccatcgaggtcctggcaccccgccgcaaaaaaagaacgtgtttcactcagcctgttccccgttctggaaagaagagggctgcgatgatgacagaggttcttgcacataagataagggcagtggaaaagaaacctattccccgaatcaagcggaagaataactcaacaacaacaaacaacagtaagccttcgtcactgccaaccttagggagtaacactgagaccgtgcaacctgaagtaaaaagtgaaaccgaaccccattttatcttaaaaagttcagacaacactaaaacttattcgctgatgccatccgctcctcacccagtgaaagaggcatctccaggcttctcctggtccccgaagactgcttcagccacaccagctccactgaagaatgacgcaacagcctcatgcgggttttcagaaagaagcagcactccccactgtacgatgccttcgggaagactcagtggtgccaatgctgcagctgctgatggccctggcatttcacagcttggcgaagtggctcctctccccaccctgtctgctcctgtgatggagcccctcattaattctgagccttccactggtgtgactgagccgctaacgcctcatcagccaaaccaccagccctccttcctcacctctcctcaagaccttgcctcttctccaatggaagaagatgagcagcattctgaagcagatgagcctccatcagacgaacccctatctgatgaccccctgtcacctgctgaggagaaattgccccacattgatgagtattggtcagacagtgagcacatctttttggatgcaaatattggtggggtggccatcgcacctgctcacggctcggttttgattgagtgtgcccggcgagagctgcacgctaccactcctgttgagcaccccaaccgtaatcatccaacccgcctctcccttgtcttttaccagcacaaaaacctaaataagccccaacatggttttgaactaaacaagattaagtttgaggctaaagaagctaagaataagaaaatgaaggcctcagagcaaaaagaccaggcagctaatgaaggtccagaacagtcctctgaagtaaatgaattgaaccaaattccttctcataaagcattaacattaacccatgacaatgttgtcaccgtgtccccttatgctctcacacacgttgcggggccctataaccattgggtctgacgtacgggaggaggatctcggaccgaagagtacaagcttatcctgaacggtaaaaccctgaaaggtgaaaccaccaccgaagctgttgacgctgctaccgcggaaaaagttttcaaacagtacgctaacgacaacggtgttgacggtgaatggacctacgacgacgctaccaaaaccttcacggtaaccgaaggtggtggtagcggtggtggtactagtccaaaaacaaggaggagaccgcgaagatcacaacggaaaaggccgcctacgccatggccgtaagtttgagctcgaatttccccgatcgttcaaacatttggcaataaagtttcttaagattgaatcctgttgccggtcttgcgatgattatcatataatttctgttgaattacgttaagcatgtaataattaacatgtaatgcatgacgttatttatgagatgggtttttatgattagagtcccgcaattatacatttaatacgcgatagaaaacaaaatatagcgcgcaaactaggataaattatcgcgcgcggtgtcatctatgttac

SEQ ID NO: 80 - DNA, 563 bp, Artificial Sequence
  Synthetic Construct
  misc_feature 451, 452, 453, 454, 455, 456, 457, 458, 459, 460, 461, 462,463, 464, 465, 466, 467, 468, 469, 470: n = A,T,C or G
cttaagtcgttgaacaacggaaactcgacttgccttccgcacaatacatcatttcttcttagctttttttcttcttcttcgttcatacagtttttttttgtttatcagcttacattttcttgaaccgtagctttcgttttcttctttttaactttccattcggagtttttgtatcttgtttcatagtttgtcccaggattagaatgattaggcatcgaaccttcaagaatttgattgaataaaacatcttcattcttaagatatgaagataatcttcaaaaggcccctgggaatctgaaagaagagaagcaggcccatttatatgggaaagaacaatagtatttcttatataggcccatttaagttgaaaacaatcttcaaaagtcccacatcgcttagataagaaaacgaagctgagtttatatacagctagagtcgaagtagtgattgnnnnnnnnnnnnnnnnnnnngttttagagctagaaatagcaagttaaaataaggctagtccgttatcaacttgaaaaagtggcaccgagtcggtgctttttttgtttcttaag

SEQ ID NO: 81 - DNA, 1994 bp, Artificial Sequence
  Synthetic Construct
atgcatatgagtctagctcaacagagcttttaacccaaattggtacaatagaatacaactttagatcataattctcaaaagaaagagattccttagctattctatctgccactccatttccttctcggcttgtatgcacaagcataaaatcctcaaacttgctaagtagatactttatgtcttggataattggattgagacttgacaagcataactttcatgtaaccaaagacacaagttgctgagaatccacctcaaaaatgatcttcctataattgaatcgggataatgacagcacagcccatctaagagcctccacttctacttccagcacgcttcttacttttaccacagctcttgcacctaaccataacaccttccctgtatgatcgcgaagcacccaccctaagccacattttaatccttctgttggccatgccccatcaaagttgcacttaacccaagattgtggtggagcttcccatgtttctcgtctgtcccgacggtgttgtggttggtgctttccttacattctgagcctctttccttctaatccactcatctgcatcttcttgtgtccttactaatacctcattggttccaaattccctccctttaagcaccagctcgtttctgttcttccacagcctcccaagtatccaagggactaaagcctccacattcttcagatcaggatattcttgtttaagatgttgaactctatggaggtttgtatgaactgatgatctaggaccggataagttcccttcttcatagcgaacttattcaaagaatgttttgtgtatcattcttgttacattgttattaatgaaaaaatattattggtcattggactgaacacgagtgttaaatatggaccaggccccaaataagatccattgatatatgaattaaataacaagaataaatcgagtcaccaaaccacttgccttttttaacgagacttgttcaccaacttgatacaaaagtcattatcctatgcaaatcaataatcatacaaaaatatccaataacactaaaaaattaaaagaaatggataatttcacaatatgttatacgataaagaagttacttttccaagaaattcactgattttataagcccacttgcattagataaatggcaaaaaaaaacaaaaaggaaaagaaataaagcacgaagaattctagaaaatacgaaatacgcttcaatgcagtgggacccacggttcaattattgccaattttcagctccaccgtatatttaaaaaataaaacgataatgctaaaaaaatataaatcgtaacgatcgttaaatctcaacggctggatcttatgacgaccgttagaaattgtggttgtcgacgagtcagtaataaacggcgtcaaagtggttgcagccggcacacacgagtcgtgtttatcaactcaaagcacaaatacttttcctcaacctaaaaataaggcaattagccaaaaacaactttgcgtgtaaacaacgctcaatacacgtgtcattttattattagctattgcttcaccgccttagctttctcgtgacctagtcgtcctcgtcttttcttcttcttcttctataaaacaatacccaaagagctcttcttcttcacaattcagatttcaatttctcaaaatcttaaaaactttctctcaattctctctaccgtgatcaaggtaaatttctgtgttccttattctctcaaaatcttcgattttgttttcgttcgatcccaatttcgtatatgttctttggtttagattctgttaatcttagatcgaagacgattttctgggtttgatcgttagatatcatcttaattctcgattagggtttcatagatatcatccgatttgttcaaataatttgagttttgtcgaataattactcttcgatttgtgatttctatctagatctggtgttagtttctagtttgtgcgatcgaatttgtcgattaatctgagtttttctgattaaca

SEQ ID NO: 82 - DNA, 115 bp, Artificial Sequence; identical to SEQ ID NO: 33
  Synthetic Construct

SEQ ID NO: 83 - DNA, 4107 bp, Artificial Sequence; identical to SEQ ID NO: 34
  Synthetic Construct

SEQ ID NO: 84 - DNA, 27 bp, Artificial Sequence
  Synthetic Construct
tatccctatgacgtgcccgattatgcc

SEQ ID NO: 85 - DNA, 47 bp, Artificial Sequence
  Synthetic Construct
ccaagaaaaaacgcaaggtggaagatcctaagaaaaagcggaaagtg

SEQ ID NO: 86 - DNA, 60 bp, Artificial Sequence
  Synthetic Construct
gacggcattggtagtgggagcaacggcagcagcggatccaacggtccgactgacgccgcg

SEQ ID NO: 87 - DNA, 621 bp, Artificial Sequence
  Synthetic Construct
gaagaggagcttctgagcaaaaactatcacctcgaaaacgaggttgcgcgactgaagaaaggaagcgggtccggtggaagtggctccggatctggaggttctggcagcggaggtagcggcagtggcgaagagctccttagtaagaactatcatctggaaaatgaggtagcgcgcttaaagaaagggtcgggaagtggcggcagcggaagtgggagtggagggagcggttctggcggttccggcagtggagaggagttgctgtctaagaactaccacttagaaaacgaagtcgcacggctaaaaaaaggttccggctccggcggctccggttctggaagcgggggctcgggatcaggtggatctggatcaggagaggaattgctttccaaaaactaccaccttgagaatgaggtggccaggttaaagaaggggagcggctcggggggtagtggatcggggtcgggcgggtcaggaagcggtggtagcggatctggggaggagctgctctcgaagaattaccatttggagaacgaagtggcgagactaaagaagggaagcggtagtggtggttcagggtctggttcaggtggcagtgggtctgggggctcagggtccgggtag

SEQ ID NO: 88 - DNA, 768 bp, Artificial Sequence
  Synthetic Construct
tagagtcctgctttaatgagatatgcgagacgcctatgatcgcatgatatttgctttcaattctgttgtgcacgttgtaaaaaacctgagcatgtgtagctcagatccttaccgccggtttcggttcattctaatgaatatatcacccgttactatcgtatttttatgaataatattctccgttcaatttactgattgtaccctactacttatatgtacaatattaaaatgaaaacaatatattgtgctgaataggtttatagcgacatctatgatagagcgccacaataacaaacaattgcgttttattattacaaatccaattttaaaaaaagcggcagaaccggtcaaacctaaaagactgattacataaatcttattcaaatttcaaaagtgccccaggggctagtatctacgacacaccgagcggcgaactaataacgttcactgaagggaactccggttccccgccggcgcgcatgggtgagattccttgaagttgagtattggccgtccgctctaccgaaagttacgggcaccattcaacccggtccagcacggcggccgggtaaccgacttgctgccccgagaattatgcagcatttttttggtgtatgtgggccccaaatgaagtgcaggtcaaaccttgacagtgacgacaaatcgttgggcgggtccagggcgaattttgcgacaacatgtcgaggctcagcaggaccggcatgcaagctagcttactagtgatattctatagtgtcacctaaatct

SEQ ID NO: 89 - DNA, 2018 bp, Artificial Sequence
  Synthetic Construct
ttcctaacacctggagaaccttttatgtacttcacaaccctcaatgctgcttccaggtgtgactgtttgggttgctgcatgaattgactcagcacctgcactgcaaagctgatatctggccttgtgattgtcaagtagagaagctttcccaccagtctctgataggatcccacatcctctaactctgcatcatcagtctttcctaagtgcttgtcatattctacagtagtcagcctttggttctgttccattggggttgacactggtctgcagcctcccagaccaacacctgatatcagttccagtgcatacttcctctggttcagtaggattcccttttctgatctcagcacctcaatgcctaagaagtattttagttctcccaaatctttcatcttgaaatgctgatgcagggttgcctttgcttctgaaatcaaaacattgctgctgcctgttattaacagatcatccacataaatcaggattatgacaaggtcagtcccctctcttttggtaaacaaggagtgatcataagcactttgcataaaaccagcctgcataaggacagtggtaagcttgatgttccactgccttgatgcttgctttaaaccatagagggattcaacagcctgcacactttggtctccccttggctgtgaaaaccctgaggcagagacatataaacttcttccatgaggtcaccttgtagaaaagcattgttgacatccatctggaaaaggaaccagcccttggaagcagcaacagatatgacagcttttacagtgaccattttggccactggagaaaaagtttcatggtagtcaaggccttcttgctgagtgtatcccttggccactagccttgccttaaacctgtcaacttcaccattagctttgtatttaattttgtacacccatttggaccctataggctgtttaccagggggtaaagggacaatctcccaggtgttattatcctcaagagcctgtatctcaagggacatggcctccatccatttctcatcttgagctgcttctttgaaggatttaggttcagtataagtggagaaagcactcaaataagcttgatagtgaacaggcaagtgatcataggaaacatagttggctatagggtatggaacatccctagagcctttgttcagtgtcacaaagtccttgagccagatgggaggacctgcattgcgtttaggtctagtgtgcaggtttgctggaactagagagggatcagctacagcagtatggtgctcaaattcagcatttgctaggtcaggctcagctgactcaactgactctgcaggagcatgcaggtggcctgaaggtgcagcatcagctgaagtgatatgattttgggtagaatgagtccccaaagtgatatcctcattggcctctacaatgtcaggaataagaactggagtatcatcatcatcagtatgaaagctggaaggaaaaatatcattatacactagctgcaaagctgtatcttcagagctaagtgaacctgctcgagtgaacatatcaggttcatgggagatggactctttgaaagggaactgaaactctctgaaaactacatccctgctcactatgatcaccttattatccaagtcatacaacctgtaacccttttgagtctcagaataaccaatgaagatggttcgcttggctctaggtgcaagtttgtcacctttgggcagtgttgctgcaaaagcaagacacccaaacactctcaagtgatcaagcttggcatgtttctgatagagtagttcatatggacatttgccttgtaagattggagtagggagtctattgatcaggtatacaacagtcttgacacagtctccccaaaacctggtaggtacaccactctgaaacttaagtgcccttgccatctcaaggatgtgtctgtgctttctctccacaacaccattctgttgtggtgtgtagggacagctactttgatgaacaatcccaagagaggccagcaactcattacaactt

SEQ ID NO: 90 - DNA, 831 bp, Artificial Sequence
  Synthetic Construct
atgggccccgacatcgtgatgacccagagccccagcagcctgagcgccagcgtgggcgaccgcgtgaccatcacctgccgcagcagcaccggcgccgtgaccaccagcaactacgccagctgggtgcaggagaagcccggcaagctgttcaagggcctgatcggcggcaccaacaaccgcgcccccggcgtgcccagccgcttcagcggcagcctgatcggcgacaaggccaccctgaccatcagcagcctgcagcccgaggacttcgccacctacttctgcgccctgtggtacagcaaccactgggtgttcggccagggcaccaaggtggagctgaagcgcggcggcggcggcagcggcggcggcggcagcggcggcggcggcagcagcggcggcggcagcgaggtgaagctgctggagagcggcggcggcctggtgcagcccggcggcagcctgaagctgagctgcgccgtgagcggcttcagcctgaccgactacggcgtgaactgggtgcgccaggcccccggccgcggcctggagtggatcggcgtgatctggggcgacggcatcaccgactacaacagcgccctgaaggaccgcttcatcatcagcaaggacaacggcaagaacaccgtgtacctgcagatgagcaaggtgcgcagcgacgacaccgccctgtactactgcgtgaccggcctgttcgactactggggccagggcaccctggtgaccgtgagcagctacccatacgatgttccagattacgctggtggaggcggaggttctgggggaggaggtagtggcggtggtggttcaggaggcggcggaagc

SEQ ID NO: 91 - DNA, 711 bp, Artificial Sequence
  Synthetic Construct
agcaaaggagaagaacttttcactggagttgtcccaattcttgttgaattagatggtgatgttaatgggcacaaattttctgtccgtggagagggtgaaggtgatgctacaaacggaaaactcacccttaaatttatttgcactactggaaaactacctgttccgtggccaacacttgtcactactctgacctatggtgttcaatgcttttcccgttatccggatcacatgaaacggcatgactttttcaagagtgccatgcccgaaggttatgtacaggaacgcactatatctttcaaagatgacgggacctacaagacgcgtgctgaagtcaagtttgaaggtgatacccttgttaatcgtatcgagttaaagggtattgattttaaagaagatggaaacattcttggacacaaactcgagtacaactttaactcacacaatgtatacatcacggcagacaaacaaaagaatggaatcaaagctaacttcaaaattcgccacaacgttgaagatggttccgttcaactagcagaccattatcaacaaaatactccaattggcgatggccctgtccttttaccagacaaccattacctgtcgacacaatctgtcctttcgaaagatcccaacgaaaagcgtgaccacatggtccttcttgagtttgtaactgctgctgggattacacatggcatggatgagctctacaaa

SEQ ID NO: 92 - DNA, 2157 bp, Artificial Sequence; identical to SEQ ID NO: 38
  Synthetic Construct

SEQ ID NO: 93 - DNA, 263 bp, Artificial Sequence
  Synthetic Construct
gagctcgaatttccccgatcgttcaaacatttggcaataaagtttcttaagattgaatcctgttgccggtcttgcgatgattatcatataatttctgttgaattacgttaagcatgtaataattaacatgtaatgcatgacgttatttatgagatgggtttttatgattagagtcccgcaattatacatttaatacgcgatagaaaacaaaatatagcgcgcaaactaggataaattatcgcgcgcggtgtcatctatgttac

SEQ ID NO: 94 - protein, 1626 aa, Artificial Sequence
  Synthetic Construct
MDKKYSIGLAIGTNSVGWAVITDEYKVPSKKFKVLGNTDRHSIKKNLIGALLFDSGETAEATRLKRTARRRYTRRKNRICYLQEIFSNEMAKVDDSFFHRLEESFLVEEDKKHERHPIFGNIVDEVAYHEKYPTIYHLRKKLVDSTDKADLRLIYLALAHMIKFRGHFLIEGDLNPDNSDVDKLFIQLVQTYNQLFEENPINASGVDAKAILSARLSKSRRLENLIAQLPGEKKNGLFGNLIALSLGLTPNFKSNFDLAEDAKLQLSKDTYDDDLDNLLAQIGDQYADLFLAAKNLSDAILLSDILRVNTEITKAPLSASMIKRYDEHHQDLTLLKALVRQQLPEKYKEIFFDQSKNGYAGYIDGGASQEEFYKFIKPILEKMDGTEELLVKLNREDLLRKQRTFDNGSIPHQIHLGELHAILRRQEDFYPFLKDNREKIEKILTFRIPYYVGPLARGNSRFAWMTRKSEETITPWNFEEVVDKGASAQSFIERMTNFDKNLPNEKVLPKHSLLYEYFTVYNELTKVKYVTEGMRKPAFLSGEQKKAIVDLLFKTNRKVTVKQLKEDYFKKIECFDSVEISGVEDRFNASLGTYHDLLKIIKDKDFLDNEENEDILEDIVLTLTLFEDREMIEERLKTYAHLFDDKVMKQLKRRRYTGWGRLSRKLINGIRDKQSGKTILDFLKSDGFANRNFMQLIHDDSLTFKEDIQKAQVSGQGDSLHEHIANLAGSPAIKKGILQTVKVVDELVKVMGRHKPENIVIEMARENQTTQKGQKNSRERMKRIEEGIKELGSQILKEHPVENTQLQNEKLYLYYLQNGRDMYVDQELDINRLSDYDVDAIVPQSFLKDDSIDNKVLTRSDKNRGKSDNVPSEEVVKKMKNYWRQLLNAKLITQRKFDNLTKAERGGLSELDKAGFIKRQLVETRQITKHVAQILDSRMNTKYDENDKLIREVKVITLKSKLVSDFRKDFQFYKVREINNYHHAHDAYLNAVVGTALIKKYPKLESEFVYGDYKVYDVRKMIAKSEQEIGKATAKYFFYSNIMNFFKTEITLANGEIRKRPLIETNGETGEIVWDKGRDFATVRKVLSMPQVNIVKKTEVQTGGFSKESILPKRNSDKLIARKKDWDPKKYGGFDSPTVAYSVLVVAKVEKGKSKKLKSVKELLGITIMERSSFEKNPIDFLEAKGYKEVKKDLIIKLPKYSLFELENGRKRMLASAGELQKGNELALPSKYVNFLYLASHYEKLKGSPEDNEQKQLFVEQHKHYLDEIIEQISEFSKRVILADANLDKVLSAYNKHRDKPIREQAENIIHLFTLTNLGAPAAFKYFDTTIDRKRYTSTKEVLDATLIHQSITGLYETRIDLSQLGGDAYPYDVPDYASLGSGSPKKKRKVEDPKKKRKVDGIGSGSNGSSGSNGPTDAAEEELLSKNYHLENEVARLKKGSGSGGSGSGSGGSGSGGSGSGEELLSKNYHLENEVARLKKGSGSGGSGSGSGGSGSGGSGSGEELLSKNYHLENEVARLKKGSGSGGSGSGSGGSGSGGSGSGEELLSKNYHLENEVARLKKGSGSGGSGSGSGGSGSGGSGSGEELLSKNYHLENEVARLKKGSGSGGSGSGSGGSGSGGSGSG

SEQ ID NO: 95 - protein, 1369 aa, Artificial Sequence; identical to SEQ ID NO: 41
  Synthetic Construct

SEQ ID NO: 96 - protein, 9 aa, Artificial Sequence
  Synthetic Construct
YPYDVPDYA

SEQ ID NO: 97 - protein, 16 aa, Artificial Sequence
  Synthetic Construct
PKKKRKVEDPKKKRKV

SEQ ID NO: 98 - protein, 20 aa, Artificial Sequence
  Synthetic Construct
DGIGSGSNGSSGSNGPTDAA

SEQ ID NO: 99 - protein, 206 aa, Artificial Sequence
  Synthetic Construct
EEELLSKNYHLENEVARLKKGSGSGGSGSGSGGSGSGGSGSGEELLSKNYHLENEVARLKKGSGSGGSGSGSGGSGSGGSGSGEELLSKNYHLENEVARLKKGSGSGGSGSGSGGSGSGGSGSGEELLSKNYHLENEVARLKKGSGSGGSGSGSGGSGSGGSGSGEELLSKNYHLENEVARLKKGSGSGGSGSGSGGSGSGGSGSG

SEQ ID NO: 100 - protein, 1286 aa, Artificial Sequence
  Synthetic Construct
MGPDIVMTQSPSSLSASVGDRVTITCRSSTGAVTTSNYASWVQEKPGKLFKGLIGGTNNRAPGVPSRFSGSLIGDKATLTISSLQPEDFATYFCALWYSNHWVFGQGTKVELKRGGGGSGGGGSGGGGSSGGGSEVKLLESGGGLVQPGGSLKLSCAVSGFSLTDYGVNWVRQAPGRGLEWIGVIWGDGITDYNSALKDRFIISKDNGKNTVYLQMSKVRSDDTALYYCVTGLFDYWGQGTLVTVSSYPYDVPDYAGGGGGSGGGGSGGGGSGGGGSLDPGGGGSGSKGEELFTGVVPILVELDGDVNGHKFSVRGEGEGDATNGKLTLKFICTTGKLPVPWPTLVTTLTYGVQCFSRYPDHMKRHDFFKSAMPEGYVQERTISFKDDGTYKTRAEVKFEGDTLVNRIELKGIDFKEDGNILGHKLEYNFNSHNVYITADKQKNGIKANFKIRHNVEDGSVQLADHYQQNTPIGDGPVLLPDNHYLSTQSVLSKDPNEKRDHMVLLEFVTAAGITHGMDELYKGGGRTGRTYPYDVPDYASLGSGAPKKKRKVEAPKKKRKVGGGGSGLPTCSCLDRVIQKDKGPYYTHLGAGPSVAAVREIMENRYGQKGNAIRIEIVVYTGKEGKSSHGCPIAKWVLRRSSDEEKVLCLVRQRTGHHCPTAVMVVLIMVWDGIPLPMADRLYTELTENLKSYNGHPTDRRCTLNENRTCTCQGIDPETCGASFSFGCSWSMYFNGCKFGRSPSPRRFRIDPSSPLHEKNLEDNLQSLATRLAPIYKQYAPVAYQNQVEYENVARECRLGSKEGRPFSGVTACLDFCAHPHRDIHNMNNGSTVVCTLTREDNRSLGVIPQDEQLHVLPLYKLSDTDEFGSKEGMEAKIKSGAIEVLAPRRKKRTCFTQPVPRSGKKRAAMMTEVLAHKIRAVEKKPIPRIKRKNNSTTTNNSKPSSLPTLGSNTETVQPEVKSETEPHFILKSSDNTKTYSLMPSAPHPVKEASPGFSWSPKTASATPAPLKNDATASCGFSERSSTPHCTMPSGRLSGANAAAADGPGISQLGEVAPLPTLSAPVMEPLINSEPSTGVTEPLTPHQPNHQPSFLTSPQDLASSPMEEDEQHSEADEPPSDEPLSDDPLSPAEEKLPHIDEYWSDSEHIFLDANIGGVAIAPAHGSVLIECARRELHATTPVEHPNRNHPTRLSLVFYQHKNLNKPQHGFELNKIKFEAKEAKNKKMKASEQKDQAANEGPEQSSEVNELNQIPSHKALTLTHDNVVTVSPYALTHVAGPYNHWV

SEQ ID NO: 101 - protein, 277 aa, Artificial Sequence
  Synthetic Construct
MGPDIVMTQSPSSLSASVGDRVTITCRSSTGAVTTSNYASWVQEKPGKLFKGLIGGTNNRAPGVPSRFSGSLIGDKATLTISSLQPEDFATYFCALWYSNHWVFGQGTKVELKRGGGGSGGGGSGGGGSSGGGSEVKLLESGGGLVQPGGSLKLSCAVSGFSLTDYGVNWVRQAPGRGLEWIGVIWGDGITDYNSALKDRFIISKDNGKNTVYLQMSKVRSDDTALYYCVTGLFDYWGQGTLVTVSSYPYDVPDYAGGGGGSGGGGSGGGGSGGGGS

SEQ ID NO: 102 - protein, 237 aa, Artificial Sequence
  Synthetic Construct
SKGEELFTGVVPILVELDGDVNGHKFSVRGEGEGDATNGKLTLKFICTTGKLPVPWPTLVTTLTYGVQCFSRYPDHMKRHDFFKSAMPEGYVQERTISFKDDGTYKTRAEVKFEGDTLVNRIELKGIDFKEDGNILGHKLEYNFNSHNVYITADKQKNGIKANFKIRHNVEDGSVQLADHYQQNTPIGDGPVLLPDNHYLSTQSVLSKDPNEKRDHMVLLEFVTAAGITHGMDELYK

SEQ ID NO: 103 - protein, 718 aa, Artificial Sequence; identical to SEQ ID NO: 8
  Synthetic Construct

SEQ ID NO: 104 - protein, 411 aa, Artificial Sequence
  Synthetic Construct
EEELLSKNYHLENEVARLKKGSGSGGSGSGSGGSGSGGSGSGEELLSKNYHLENEVARLKKGSGSGGSGSGSGGSGSGGSGSGEELLSKNYHLENEVARLKKGSGSGGSGSGSGGSGSGGSGSGEELLSKNYHLENEVARLKKGSGSGGSGSGSGGSGSGGSGSGEELLSKNYHLENEVARLKKGSGSGGSGSGSGGSGSGGSGSGEELLSKNYHLENEVARLKKGSGSGGSGSGSGGSGSGGSGSGEELLSKNYHLENEVARLKKGSGSGGSGSGSGGSGSGGSGSGEELLSKNYHLENEVARLKKGSGSGGSGSGSGGSGSGGSGSGEELLSKNYHLENEVARLKKGSGSGGSGSGSGGSGSGGSGSGEELLSKNYHLENEVARLKKGSGSGGSGSGSGGSGSGGSGSG

SEQ ID NO: 105 - DNA, 17065 bp, Artificial Sequence
  Synthetic Construct
aaaaaaagcaccgactcggtgccactttttcaagttgataacggactagccttattttaacttgctatttctagctctaaaacaagcccatacatctttccgtcaatcactacttcgactctagctgtatataaactcagcttcgttttcttatctaagcgatgtgggacttttgaagattgttttcaacttaaatgggcctatataagaaatactattgttctttcccatataaatgggcctgcttctcttctttcagattcccaggggccttttgaagattatcttcatatcttaagaatgaagatgttttattcaatcaaattcttgaaggttcgatgcctaatcattctaatcctgggacaaactatgaaacaagatacaaaaactccgaatggaaagttaaaaagaagaaaacgaaagctacggttcaagaaaatgtaagctgataaacaaaaaaaaactgtatgaacgaagaagaagaaaaaaagctaagaagaaatgatgtattgtgcggaaggcaagtcgagtttccgttgttcaacgaaagcttaaacgtaacatagatgacaccgcgcgcgataatttatcctagtttgcgcgctatattttgttttctatcgcgtattaaatgtataattgcgggactctaatcataaaaacccatctcataaataacgtcatgcattacatgttaattattacatgcttaacgtaattcaacagaaattatatgataatcatcgcaagaccggcaacaggattcaatcttaagaaactttattgccaaatgtttgaacgatcggggaaattcgagctcaaacttacggccatggcgtaggcggccttttccgttgtgatcttcgcggtctcctccttgtttttggactagtaccaccaccgctaccaccaccttcggttaccgtgaaggttttggtagcgtcgtcgtaggtccattcaccgtcaacaccgttgtcgttagcgtactgtttgaaaactttttccgcggtagcagcgtcaacagcttcggtggtggtttcacctttcagggttttaccgttcaggataagcttgtactcttcggtccgagatcctcctcccgtacgtcagacccaatggttatagggccccgcaacgtgtgtgagagcataaggggacacggtgacaacattgtcatgggttaatgttaatgctttatgagaaggaatttggttcaattcatttacttcagaggactgttctggaccttcattagctgcctggtctttttgctctgaggccttcattttcttattcttagcttctttagcctcaaacttaatcttgtttagttcaaaaccatgttggggcttatttaggtttttgtgctggtaaaagacaagggagaggcgggttggatgattacggttggggtgctcaacaggagtggtagcgtgcagctctcgccgggcacactcaatcaaaaccgagccgtgagcaggtgcgatggccaccccaccaatatttgcatccaaaaagatgtgctcactgtctgaccaatactcatcaatgtggggcaatttctcctcagcaggtgacagggggtcatcagataggggttcgtctgatggaggctcatctgcttcagaatgctgctcatcttcttccattggagaagaggcaaggtcttgaggagaggtgaggaaggagggctggtggtttggctgatgaggcgttagcggctcagtcacaccagtggaaggctcagaattaatgaggggctccatcacaggagcagacagggtggggagaggagccacttcgccaagctgtgaaatgccagggccatcagcagctgcagcattggcaccactgagtcttcccgaaggcatcgtacagtggggagtgctgcttctttctgaaaacccgcatgaggctgttgcgtcattcttcagtggagctggtgtggctgaagcagtcttcggggaccaggagaagcctggagatgcctctttcactgggtgaggagcggatggcatcagcgaataagttttagtgttgtctgaactttttaagataaaatggggttcggtttcactttttacttcaggttgcacggtctcagtgttactccctaaggttggcagtgacgaaggcttactgttgtttgttgttgttgagttattcttccgcttgattcggggaataggtttcttttccactgcccttatcttatgtgcaagaacctctgtcatcatcgcagccctcttctttccagaacggggaacaggctgagtgaaacacgttctttttttgcggcggggtgccaggacctcgatggccccagatttgatcttggcttccattccttccttggagccaaactcatctgtgtctgaaagcttataaagaggtagcacatggagctgctcatcttgaggaataacacccaaagagcggttatcttctcgagttaaggtacaaaccacagtgcttccattattcatgttgtgaatgtccctgtggggatgagcacagaagtccaggcaagcagtgaccccagagaagggtcgaccttccttgctgccaagccgacattctcgggcaacattttcatattccacctgattttggtaagctactggagcatactgcttataaattggagctaatcgtgtagccaaactctgtaagttatcttcaaggtttttttcatgtaagggagagcttggatcaattctaaatcttctggggcttgggcttctaccaaacttacagccattaaagtacatactccatgaacagccaaaagagaatgaagctccacaagtctctggatcaattccttgacatgtacaggtacgattttcattgagggtgcatcttctgtcggtagggtgcccattgtatgactttagattctctgtgagctctgtgtatagccggtcggccattggaagagggatgccatcccacaccatgatgagcaccaccatcacagcagttggacagtggtggcctgtacgctgccggaccaaacaaagaactttttcttcatcactgcttcttcttaaaacccacttagcaattggacacccatgagagcttttcccttctttaccggtgtacactactatttctatccttattgcgtttcctttttgaccatacctattctccatgatttccctgacagcagcaacacttggtcctgccccaaggtgtgtataatatgggcctttgtctttttgtataactcgatcaagacagctgcaggtgggcagcccggatccgccaccgcccactttccgctttttcttaggagcttccaccttgcgttttttcttgggagcgccgctgcccaggctggcataatcgggcacgtcatagggatacgtacgaccggtccgacctccacctttgtagagctcatccatgccatgtgtaatcccagcagcagttacaaactcaagaaggaccatgtggtcacgcttttcgttgggatctttcgaaaggacagattgtgtcgacaggtaatggttgtctggtaaaaggacagggccatcgccaattggagtattttgttgataatggtctgctagttgaacggaaccatcttcaacgttgtggcgaattttgaagttagctttgattccattcttttgtttgtctgccgtgatgtatacattgtgtgagttaaagttgtactcgagtttgtgtccaagaatgtttccatcttctttaaaatcaataccctttaactcgatacgattaacaagggtatcaccttcaaacttgacttcagcacgcgtcttgtaggtcccgtcatctttgaaagatatagtgcgttcctgtacataaccttcgggcatggcactcttgaaaaagtcatgccgtttcatgtgatccggataacgggaaaagcattgaacaccataggtcagagtagtgacaagtgttggccacggaacaggtagttttccagtagtgcaaataaatttaagggtgagttttccgtttgtagcatcaccttcaccctctccacggacagaaaatttgtgcccattaacatcaccatctaattcaacaagaattgggacaactccagtgaaaagttcttctcctttgctaccgcttccacctccacctggatccaagcttccgccgcctcctgaaccaccaccgccactacctcctcccccagaacctccgcctccaccagcgtaatctggaacatcgtatgggtagctgctcacggtcaccagggtgccctggccccagtagtcgaacaggccggtcacgcagtagtacagggcggtgtcgtcgctgcgcaccttgctcatctgcaggtacacggtgttcttgccgttgtccttgctgatgatgaagcggtccttcagggcgctgttgtagtcggtgatgccgtcgccccagatcacgccgatccactccaggccgcggccgggggcctggcgcacccagttcacgccgtagtcggtcaggctgaagccgctcacggcgcagctcagcttcaggctgccgccgggctgcaccaggccgccgccgctctccagcagcttcacctcgctgccgccgccgctgctgccgccgccgccgctgccgccgccgccgctgccgccgccgccgcgcttcagctccaccttggtgccctggccgaacacccagtggttgctgtaccacagggcgcagaagtaggtggcgaagtcctcgggctgcaggctgctgatggtcagggtggccttgtcgccgatcaggctgccgctgaagcggctgggcacgccgggggcgcggttgttggtgccgccgatcaggcccttgaacagcttgccgggcttctcctgcacccagctggcgtagttgctggtggtcacggcgccggtgctgctgcggcaggtgatggtcacgcggtcgcccacgctggcgctcaggctgctggggctctgggtcatcacgatgtcggggcccataaaccctaggtgttaatcagaaaaactcagattaatcgacaaattcgatcgcacaaactagaaactaacaccagatctagatagaaatcacaaatcgaagagtaattattcgacaaaactcaaattatttgaacaaatcggatgatatctatgaaaccctaatcgagaattaagatgatatctaacgatcaaacccagaaaatcgtcttcgatctaagattaacagaatctaaaccaaagaacatatacgaaattgggatcgaacgaaaacaaaatcgaagattttgagagaataaggaacacagaaatttaccttgatcacggtagagagaattgagagaaagtttttaagattttgagaaattgaaatctgaattgtgaagaagaagagctctttgggtattgttttatagaagaagaagaagaaaagacgaggacgactaggtcacgagaaagctaaggcggtgaagcaatagctaataataaaatgacacgtgtattgagcgttgtttacacgcaaagttgtttttggctaattgccttatttttaggttgaggaaaagtatttgtgctttgagttgataaacacgactcgtgtgtgccggctgcaaccactttgacgccgtttattactgactcgtcgacaaccacaatttctaacggtcgtcataagatccagccgttgagatttaacgatcgttacgatttatatttttttagcattatcgttttattttttaaatatacggtggagctgaaaattggcaataattgaaccgtgggtcccactgcattgaagcgtatttcgtattttctagaattcttcgtgctttatttcttttcctttttgtttttttttgccatttatctaatgcaagtgggcttataaaatcagtgaatttcttggaaaagtaacttctttatcgtataacatattgtgaaattatccatttcttttaattttttagtgttattggatatttttgtatgattattgatttgcataggataatgacttttgtatcaagttggtgaacaagtctcgttaaaaaaggcaagtggtttggtgactcgatttattcttgttatttaattcatatatcaatggatcttatttggggcctggtccatatttaacactcgtgttcagtccaatgaccaataatattttttcattaataacaatgtaacaagaatgatacacaaaacattctttgaataagttcgctatgaagaagggaacttatccggtcctagatcatcagttcatacaaacctccatagagttcaacatcttaaacaagaatatcctgatctgaagaatgtggaggctttagtcccttggatacttgggaggctgtggaagaacagaaacgagctggtgcttaaagggagggaatttggaaccaatgaggtattagtaaggacacaagaagatgcagatgagtggattagaaggaaagaggctcagaatgtaaggaaagcaccaaccacaacaccgtcgggacagacgagaaacatgggaagctccaccacaatcttgggttaagtgcaactttgatggggcatggccaacagaaggattaaaatgtggcttagggtgggtgcttcgcgatcatacagggaaggtgttatggttaggtgcaagagctgtggtaaaagtaagaagcgtgctggaagtagaagtggaggctcttagatgggctgtgctgtcattatcccgattcaattataggaagatcatttttgaggtggattctcagcaacttgtgtctttggttacatgaaagttatgcttgtcaagtctcaatccaattatccaagacataaagtatctacttagcaagtttgaggattttatgcttgtgcatacaagccgagaaggaaatggagtggcagatagaatagctaaggaatctctttcttttgagaattatgatctaaagttgtattctattgtaccaatttgggttaaaagctctgttgagctagactcatatgcatcctaggaaacaagttgtaatgagttgctggcctctcttgggattgttcatcaaagtagctgtccctacacaccacaacagaatggtgttgtggagagaaagcacagacacatccttgagatggcaagggcacttaagtttcagagtggtgtacctaccaggttttggggagactgtgtcaagactgttgtatacctgatcaatagactccctactccaatcttacaaggcaaatgtccatatgaactactctatcagaaacatgccaagcttgatcacttgagagtgtttgggtgtcttgcttttgcagcaacactgcccaaaggtgacaaacttgcacctagagccaagcgaaccatcttcattggttattctgagactcaaaagggttacaggttgtatgacttggataataaggtgatcatagtgagcagggatgtagttttcagagagtttcagttccctttcaaagagtccatctcccatgaacctgatatgttcactcgagcaggttcacttagctctgaagatacagctttgcagctagtgtataatgatatttttccttccagctttcatactgatgatgatgatactccagttcttattcctgacattgtagaggccaatgaggatatcactttggggactcattctacccaaaatcatatcacttcagctgatgctgcaccttcaggccacctgcatgctcctgcagagtcagttgagtcagctgagcctgacctagcaaatgctgaatttgagcaccatactgctgtagctgatccctctctagttccagcaaacctgcacactagacctaaacgcaatgcaggtcctcccatctggctcaaggactttgtgacactgaacaaaggctctagggatgttccataccctatagccaactatgtttcctatgatcacttgcctgttcactatcaagcttatttgagtgctttctccacttatactgaacctaaatccttcaaagaagcagctcaagatgagaaatggatggaggccatgtcccttgagatacaggctcttgaggataataacacctgggagattgtccctttaccccctggtaaacagcctatagggtccaaatgggtgtacaaaattaaatacaaagctaatggtgaagttgacaggtttaaggcaaggctagtggccaagggatacactcagcaagaaggccttgactaccatgaaactttttctccagtggccaaaatggtcactgtaaaagctgtcatatctgttgctgcttccaagggctggttccttttccagatggatgtcaacaatgcttttctacaaggtgacctcatggaagaagtttatatgtctctgcctcagggttttcacagccaaggggagaccaaagtgtgcaggctgttgaatccctctatggtttaaagcaagcatcaaggcagtggaacatcaagcttaccactgtccttatgcaggctggttttatgcaaagtgcttatgatcactccttgtttaccaaaagagaggggactgaccttgtcataatcctgatttatgtggatgatctgttaataacaggcagcagcaatgttttgatttcagaagcaaaggcaaccctgcatcagcatttcaagatgaaagatttgggagaactaaaatacttcttaggcattgaggtgctgagatcagaaaagggaatcctactgaaccagaggaagtatgcactggaactgatatcaggtgttggtctgggaggctgcagaccagtgtcaaccccaatggaacagaaccaaaggctgactactgtagaatatgacaagcacttaggaaagactgatgatgcagagttagaggatgtgggttcctatcagagactggtgggaaagcttctctacttgacaatcacaaggccagatatcagctttgcagtgcaggtgctgagtcaattcatgcagcaacccaaacagtcacacctggaagcagcattgagggttgtgaagtacataaaaggttctccaggtgttaggaagcggccgcatgcatatgagtctagctcaacagagcttttaacccaaattggtacaatagaatacaactttagatcataattctcaaaagaaagagattccttagctattctatctgccactccatttccttctcggcttgtatgcacaagcataaaatcctcaaacttgctaagtagatactttatgtcttggataattggattgagacttgacaagcataactttcatgtaaccaaagacacaagttgctgagaatccacctcaaaaatgatcttcctataattgaatcgggataatgacagcacagcccatctaagagcctccacttctacttccagcacgcttcttacttttaccacagctcttgcacctaaccataacaccttccctgtatgatcgcgaagcacccaccctaagccacattttaatccttctgttggccatgccccatcaaagttgcacttaacccaagattgtggtggagcttcccatgtttctcgtctgtcccgacggtgttgtggttggtgctttccttacattctgagcctctttccttctaatccactcatctgcatcttcttgtgtccttactaatacctcattggttccaaattccctccctttaagcaccagctcgtttctgttcttccacagcctcccaagtatccaagggactaaagcctccacattcttcagatcaggatattcttgtttaagatgttgaactctatggaggtttgtatgaactgatgatctaggaccggataagttcccttcttcatagcgaacttattcaaagaatgttttgtgtatcattcttgttacattgttattaatgaaaaaatattattggtcattggactgaacacgagtgttaaatatggaccaggccccaaataagatccattgatatatgaattaaataacaagaataaatcgagtcaccaaaccacttgccttttttaacgagacttgttcaccaacttgatacaaaagtcattatcctatgcaaatcaataatcatacaaaaatatccaataacactaaaaaattaaaagaaatggataatttcacaatatgttatacgataaagaagttacttttccaagaaattcactgattttataagcccacttgcattagataaatggcaaaaaaaaacaaaaaggaaaagaaataaagcacgaagaattctagaaaatacgaaatacgcttcaatgcagtgggacccacggttcaattattgccaattttcagctccaccgtatatttaaaaaataaaacgataatgctaaaaaaatataaatcgtaacgatcgttaaatctcaacggctggatcttatgacgaccgttagaaattgtggttgtcgacgagtcagtaataaacggcgtcaaagtggttgcagccggcacacacgagtcgtgtttatcaactcaaagcacaaatacttttcctcaacctaaaaataaggcaattagccaaaaacaactttgcgtgtaaacaacgctcaatacacgtgtcattttattattagctattgcttcaccgccttagctttctcgtgacctagtcgtcctcgtcttttcttcttcttcttctataaaacaatacccaaagagctcttcttcttcacaattcagatttcaatttctcaaaatcttaaaaactttctctcaattctctctaccgtgatcaaggtaaatttctgtgttccttattctctcaaaatcttcgattttgttttcgttcgatcccaatttcgtatatgttctttggtttagattctgttaatcttagatcgaagacgattttctgggtttgatcgttagatatcatcttaattctcgattagggtttcatagatatcatccgatttgttcaaataatttgagttttgtcgaataattactcttcgatttgtgatttctatctagatctggtgttagtttctagtttgtgcgatcgaatttgtcgattaatctgagtttttctgattaacagggatcatcaacaagtttgtacaaaaaagcaggctctttaaagtatttttacaacaattaccaacaacaacaaacaacaaacaacattacaattactatttacaattacaaaaaaagttaacatggacaagaagtacagcatcggcctggccatcggcaccaactctgtgggctgggccgtgatcaccgacgagtacaaggtgcccagcaagaaattcaaggtgctgggcaacaccgaccggcacagcatcaagaagaacctgatcggcgccctgctgttcgacagcggagaaacagccgaggccacccggctgaagagaaccgccagaagaagatacaccagacggaagaaccggatctgctatctgcaagagatcttcagcaacgagatggccaaggtggacgacagcttcttccacagactggaagagtccttcctggtggaagaggataagaagcacgagcggcaccccatcttcggcaacatcgtggacgaggtggcctaccacgagaagtaccccaccatctaccacctgagaaagaaactggtggacagcaccgacaaggccgacctgcggctgatctatctggccctggcccacatgatcaagttccggggccacttcctgatcgagggcgacctgaaccccgacaacagcgacgtggacaagctgttcatccagctggtgcagacctacaaccagctgttcgaggaaaaccccatcaacgccagcggcgtggacgccaaggccatcctgtctgccagactgagcaagagcagacggctggaaaatctgatcgcccagctgcccggcgagaagaagaatggcctgttcggcaacctgattgccctgagcctgggcctgacccccaacttcaagagcaacttcgacctggccgaggatgccaaactgcagctgagcaaggacacctacgacgacgacctggacaacctgctggcccagatcggcgaccagtacgccgacctgtttctggccgccaagaacctgtccgacgccatcctgctgagcgacatcctgagagtgaacaccgagatcaccaaggcccccctgagcgcctctatgatcaagagatacgacgagcaccaccaggacctgaccctgctgaaagctctcgtgcggcagcagctgcctgagaagtacaaagagattttcttcgaccagagcaagaacggctacgccggctacatcgatggcggagccagccaggaagagttctacaagttcatcaagcccatcctggaaaagatggacggcaccgaggaactgctcgtgaagctgaacagagaggacctgctgcggaagcagcggaccttcgacaacggcagcatcccccaccagatccacctgggagagctgcacgccattctgcggcggcaggaagatttttacccattcctgaaggacaaccgggaaaagatcgagaagatcctgaccttccgcatcccctactacgtgggccctctggccaggggaaacagcagattcgcctggatgaccagaaagagcgaggaaaccatcaccccctggaacttcgaggaagtggtggacaagggcgccagcgcccagagcttcatcgagcggatgaccaacttcgataagaacctgcccaacgagaaggtgctgcccaagcacagcctgctgtacgagtacttcaccgtgtacaacgagctgaccaaagtgaaatacgtgaccgagggaatgagaaagcccgccttcctgagcggcgagcagaaaaaagccatcgtggacctgctgttcaagaccaaccggaaagtgaccgtgaagcagctgaaagaggactacttcaagaaaatcgagtgcttcgactccgtggaaatctccggcgtggaagatcggttcaacgcctccctgggcacataccacgatctgctgaaaattatcaaggacaaggacttcctggacaatgaggaaaacgaggacattctggaagatatcgtgctgaccctgacactgtttgaggacagagagatgatcgaggaacggctgaaaacctatgcccacctgttcgacgacaaagtgatgaagcagctgaagcggcggagatacaccggctggggcaggctgagccggaagctgatcaacggcatccgggacaagcagtccggcaagacaatcctggatttcctgaagtccgacggcttcgccaacagaaacttcatgcagctgatccacgacgacagcctgacctttaaagaggacatccagaaagcccaggtgtccggccagggcgatagcctgcacgagcacattgccaatctggccggcagccccgccattaagaagggcatcctgcagacagtgaaggtggtggacgagctcgtgaaagtgatgggccggcacaagcccgagaacatcgtgatcgaaatggccagagagaaccagaccacccagaagggacagaagaacagccgcgagagaatgaagcggatcgaagagggcatcaaagagctgggcagccagatcctgaaagaacaccccgtggaaaacacccagctgcagaacgagaagctgtacctgtactacctgcagaatgggcgggatatgtacgtggaccaggaactggacatcaaccggctgtccgactacgatgtggacgctatcgtgcctcagagctttctgaaggacgactccatcgataacaaagtgctgactcggagcgacaagaaccggggcaagagcgacaacgtgccctccgaagaggtcgtgaagaagatgaagaactactggcgccagctgctgaatgccaagctgattacccagaggaagttcgacaatctgaccaaggccgagagaggcggcctgagcgaactggataaggccggcttcatcaagagacagctggtggaaacccggcagatcacaaagcacgtggcacagatcctggactcccggatgaacactaagtacgacgagaacgacaaactgatccgggaagtgaaagtgatcaccctgaagtccaagctggtgtccgatttccggaaggatttccagttttacaaagtgcgcgagatcaacaactaccaccacgcccacgacgcctacctgaacgccgtcgtgggaaccgccctgatcaaaaagtaccctaagctggaaagcgagttcgtgtacggcgactacaaggtgtacgacgtgcggaagatgatcgccaagagcgagcaggaaatcggcaaggctaccgccaagtacttcttctacagcaacatcatgaactttttcaagaccgagattaccctggccaacggcgagatccggaagcggcctctgatcgagacaaacggcgaaacaggcgagatcgtgtgggataagggccgggactttgccaccgtgcggaaagtgctgtctatgccccaagtgaatatcgtgaaaaagaccgaggtgcagacaggcggcttcagcaaagagtctatcctgcccaagaggaacagcgacaagctgatcgccagaaagaaggactgggaccctaagaagtacggcggcttcgacagccccaccgtggcctattctgtgctggtggtggccaaagtggaaaagggcaagtccaagaaactgaagagtgtgaaagagctgctggggatcaccatcatggaaagaagcagcttcgagaagaatcccatcgactttctggaagccaagggctacaaagaagtgaaaaaggacctgatcatcaagctgcctaagtactccctgttcgagctggaaaacggccggaagagaatgctggcctctgccggcgaactgcagaagggaaacgaactggccctgccctccaaatatgtgaacttcctgtacctggccagccactatgagaagctgaagggctcccccgaggataatgagcagaaacagctgtttgtggaacagcacaaacactacctggacgagatcatcgagcagatcagcgagttctccaagagagtgatcctggccgacgctaatctggacaaggtgctgagcgcctacaacaagcacagagacaagcctatcagagagcaggccgagaatatcatccacctgtttaccctgaccaatctgggagcccctgccgccttcaagtactttgacaccaccatcgaccggaagaggtacaccagcaccaaagaggtgctggacgccaccctgatccaccagagcatcaccggcctgtacgagacacggatcgacctgtctcagctgggaggcgacgcctatccctatgacgtgcccgattatgccagcctgggcagcggctcccccaagaaaaaacgcaaggtggaagatcctaagaaaaagcggaaagtggaagatgctccaaagaagaagagaaaggtcgacggcattggtagtgggagcaacggcagcagcggatccaacggtccgactgacgccgcggaagaagaacttttgagcaagaattatcatcttgagaacgaagtggctcgtcttaagaaaggttctggcagtggaggttctggctccggatctggtggttcgggctcaggcgggtccggatcaggcgaagaactgctttcaaagaattaccacctggaaaatgaggtagctagactgaaaaaggggagcggaagtgggggctccgggtcgggctcagggggctccggttcgggaggctcagggtcgggggaggagttgctgagcaaaaattatcatttggagaacgaagtagcacgactaaagaaagggtccggatcgggtggttcaggatctggatccggaggatcagggtccggtgggtcgggctcaggagaggagttactctcgaaaaattatcatctcgaaaacgaagtggctcggctaaaaaagggcagtggttctggaggatctgggtcggggtcaggcgggtctggatctgggggatctggatctggtgaagagctattatctaaaaactaccacctcgaaaatgaggtggcacgcttaaaaaagggaagtggcagtggtgggtcgggatctggctctggtggctcaggctcgggaggttcaggttccggggaagagctactatccaagaattatcatcttgagaacgaggtagcgcgtttgaagaagggttccggctcaggaggatctgggtcagggtcagggggttccgggtcaggcgggtccgggtcaggcgaggaactgctctcgaagaactatcatcttgaaaatgaggtcgctcgattaaaaaagggatcgggcagtggtgggtccggctccggttccggaggatcgggatctgggggctcgggatccggggaggaactactttcaaagaattaccacctcgaaaacgaagtagctcgattaaagaaaggttcagggtcgggtggctcaggttcgggatcaggtgggtcaggctccggtggttcaggttcgggagaagaattactgagtaaaaattatcatctggaaaatgaggtagcgagactaaaaaaggggagtggttctggcggttcgggatctggctctgggggctctgggtcgggagggtctgggtctggcgaggaattgctatcgaaaaattatcatcttgagaacgaagttgctaggctcaaaaagggctcaggctcaggcgggtccgggtcagggtcgggaggttccggatccgggggatcaggctcagggtaacccgggggcgcgccatgataactagagtcctgctttaatgagatatgcgagacgcctatgatcgcatgatatttgctttcaattctgttgtgcacgttgtaaaaaacctgagcatgtgtagctcagatccttaccgccggtttcggttcattctaatgaatatatcacccgttactatcgtatttttatgaataatattctccgttcaatttactgattgtaccctactacttatatgtacaatattaaaatgaaaacaatatattgtgctgaataggtttatagcgacatctatgatagagcgccacaataacaaacaattgcgttttattattacaaatccaattttaaaaaaagcggcagaaccggtcaaacctaaaagactgattacataaatcttattcaaatttcaaaag

SEQ ID NO: 106 - DNA, 16825 bp, Artificial Sequence
  Synthetic Construct
aaaaaaagcaccgactcggtgccactttttcaagttgataacggactagccttattttaacttgctatttctagctctaaaacaagcccatacatctttccgtcaatcactacttcgactctagctgtatataaactcagcttcgttttcttatctaagcgatgtgggacttttgaagattgttttcaacttaaatgggcctatataagaaatactattgttctttcccatataaatgggcctgcttctcttctttcagattcccaggggccttttgaagattatcttcatatcttaagaatgaagatgttttattcaatcaaattcttgaaggttcgatgcctaatcattctaatcctgggacaaactatgaaacaagatacaaaaactccgaatggaaagttaaaaagaagaaaacgaaagctacggttcaagaaaatgtaagctgataaacaaaaaaaaactgtatgaacgaagaagaagaaaaaaagctaagaagaaatgatgtattgtgcggaaggcaagtcgagtttccgttgttcaacgaaagcttaaacgtaacatagatgacaccgcgcgcgataatttatcctagtttgcgcgctatattttgttttctatcgcgtattaaatgtataattgcgggactctaatcataaaaacccatctcataaataacgtcatgcattacatgttaattattacatgcttaacgtaattcaacagaaattatatgataatcatcgcaagaccggcaacaggattcaatcttaagaaactttattgccaaatgtttgaacgatcggggaaattcgagctcaaacttacggccatggcgtaggcggccttttccgttgtgatcttcgcggtctcctccttgtttttggactagtaccaccaccgctaccaccaccttcggttaccgtgaaggttttggtagcgtcgtcgtaggtccattcaccgtcaacaccgttgtcgttagcgtactgtttgaaaactttttccgcggtagcagcgtcaacagcttcggtggtggtttcacctttcagggttttaccgttcaggataagcttgtactcttcggtccgagatcctcctcccgtacgtcagacccaatggttatagggccccgcaacgtgtgtgagagcataaggggacacggtgacaacattgtcatgggttaatgttaatgctttatgagaaggaatttggttcaattcatttacttcagaggactgttctggaccttcattagctgcctggtctttttgctctgaggccttcattttcttattcttagcttctttagcctcaaacttaatcttgtttagttcaaaaccatgttggggcttatttaggtttttgtgctggtaaaagacaagggagaggcgggttggatgattacggttggggtgctcaacaggagtggtagcgtgcagctctcgccgggcacactcaatcaaaaccgagccgtgagcaggtgcgatggccaccccaccaatatttgcatccaaaaagatgtgctcactgtctgaccaatactcatcaatgtggggcaatttctcctcagcaggtgacagggggtcatcagataggggttcgtctgatggaggctcatctgcttcagaatgctgctcatcttcttccattggagaagaggcaaggtcttgaggagaggtgaggaaggagggctggtggtttggctgatgaggcgttagcggctcagtcacaccagtggaaggctcagaattaatgaggggctccatcacaggagcagacagggtggggagaggagccacttcgccaagctgtgaaatgccagggccatcagcagctgcagcattggcaccactgagtcttcccgaaggcatcgtacagtggggagtgctgcttctttctgaaaacccgcatgaggctgttgcgtcattcttcagtggagctggtgtggctgaagcagtcttcggggaccaggagaagcctggagatgcctctttcactgggtgaggagcggatggcatcagcgaataagttttagtgttgtctgaactttttaagataaaatggggttcggtttcactttttacttcaggttgcacggtctcagtgttactccctaaggttggcagtgacgaaggcttactgttgtttgttgttgttgagttattcttccgcttgattcggggaataggtttcttttccactgcccttatcttatgtgcaagaacctctgtcatcatcgcagccctcttctttccagaacggggaacaggctgagtgaaacacgttctttttttgcggcggggtgccaggacctcgatggccccagatttgatcttggcttccattccttccttggagccaaactcatctgtgtctgaaagcttataaagaggtagcacatggagctgctcatcttgaggaataacacccaaagagcggttatcttctcgagttaaggtacaaaccacagtgcttccattattcatgttgtgaatgtccctgtggggatgagcacagaagtccaggcaagcagtgaccccagagaagggtcgaccttccttgctgccaagccgacattctcgggcaacattttcatattccacctgattttggtaagctactggagcatactgcttataaattggagctaatcgtgtagccaaactctgtaagttatcttcaaggtttttttcatgtaagggagagcttggatcaattctaaatcttctggggcttgggcttctaccaaacttacagccattaaagtacatactccatgaacagccaaaagagaatgaagctccacaagtctctggatcaattccttgacatgtacaggtacgattttcattgagggtgcatcttctgtcggtagggtgcccattgtatgactttagattctctgtgagctctgtgtatagccggtcggccattggaagagggatgccatcccacaccatgatgagcaccaccatcacagcagttggacagtggtggcctgtacgctgccggaccaaacaaagaactttttcttcatcactgcttcttcttaaaacccacttagcaattggacacccatgagagcttttcccttctttaccggtgtacactactatttctatccttattgcgtttcctttttgaccatacctattctccatgatttccctgacagcagcaacacttggtcctgccccaaggtgtgtataatatgggcctttgtctttttgtataactcgatcaagacagctgcaggtgggcagcccggatccgccaccgcccactttccgctttttcttaggagcttccaccttgcgttttttcttgggagcgccgctgcccaggctggcataatcgggcacgtcatagggatacgtacgaccggtccgacctccacctttgtagagctcatccatgccatgtgtaatcccagcagcagttacaaactcaagaaggaccatgtggtcacgcttttcgttgggatctttcgaaaggacagattgtgtcgacaggtaatggttgtctggtaaaaggacagggccatcgccaattggagtattttgttgataatggtctgctagttgaacggaaccatcttcaacgttgtggcgaattttgaagttagctttgattccattcttttgtttgtctgccgtgatgtatacattgtgtgagttaaagttgtactcgagtttgtgtccaagaatgtttccatcttctttaaaatcaataccctttaactcgatacgattaacaagggtatcaccttcaaacttgacttcagcacgcgtcttgtaggtcccgtcatctttgaaagatatagtgcgttcctgtacataaccttcgggcatggcactcttgaaaaagtcatgccgtttcatgtgatccggataacgggaaaagcattgaacaccataggtcagagtagtgacaagtgttggccacggaacaggtagttttccagtagtgcaaataaatttaagggtgagttttccgtttgtagcatcaccttcaccctctccacggacagaaaatttgtgcccattaacatcaccatctaattcaacaagaattgggacaactccagtgaaaagttcttctcctttgctaccgcttccacctccacctggatccaagcttccgccgcctcctgaaccaccaccgccactacctcctcccccagaacctccgcctccaccagcgtaatctggaacatcgtatgggtagctgctcacggtcaccagggtgccctggccccagtagtcgaacaggccggtcacgcagtagtacagggcggtgtcgtcgctgcgcaccttgctcatctgcaggtacacggtgttcttgccgttgtccttgctgatgatgaagcggtccttcagggcgctgttgtagtcggtgatgccgtcgccccagatcacgccgatccactccaggccgcggccgggggcctggcgcacccagttcacgccgtagtcggtcaggctgaagccgctcacggcgcagctcagcttcaggctgccgccgggctgcaccaggccgccgccgctctccagcagcttcacctcgctgccgccgccgctgctgccgccgccgccgctgccgccgccgccgctgccgccgccgccgcgcttcagctccaccttggtgccctggccgaacacccagtggttgctgtaccacagggcgcagaagtaggtggcgaagtcctcgggctgcaggctgctgatggtcagggtggccttgtcgccgatcaggctgccgctgaagcggctgggcacgccgggggcgcggttgttggtgccgccgatcaggcccttgaacagcttgccgggcttctcctgcacccagctggcgtagttgctggtggtcacggcgccggtgctgctgcggcaggtgatggtcacgcggtcgcccacgctggcgctcaggctgctggggctctgggtcatcacgatgtcggggcccataaaccctaggtgttaatcagaaaaactcagattaatcgacaaattcgatcgcacaaactagaaactaacaccagatctagatagaaatcacaaatcgaagagtaattattcgacaaaactcaaattatttgaacaaatcggatgatatctatgaaaccctaatcgagaattaagatgatatctaacgatcaaacccagaaaatcgtcttcgatctaagattaacagaatctaaaccaaagaacatatacgaaattgggatcgaacgaaaacaaaatcgaagattttgagagaataaggaacacagaaatttaccttgatcacggtagagagaattgagagaaagtttttaagattttgagaaattgaaatctgaattgtgaagaagaagagctctttgggtattgttttatagaagaagaagaagaaaagacgaggacgactaggtcacgagaaagctaaggcggtgaagcaatagctaataataaaatgacacgtgtattgagcgttgtttacacgcaaagttgtttttggctaattgccttatttttaggttgaggaaaagtatttgtgctttgagttgataaacacgactcgtgtgtgccggctgcaaccactttgacgccgtttattactgactcgtcgacaaccacaatttctaacggtcgtcataagatccagccgttgagatttaacgatcgttacgatttatatttttttagcattatcgttttattttttaaatatacggtggagctgaaaattggcaataattgaaccgtgggtcccactgcattgaagcgtatttcgtattttctagaattcttcgtgctttatttcttttcctttttgtttttttttgccatttatctaatgcaagtgggcttataaaatcagtgaatttcttggaaaagtaacttctttatcgtataacatattgtgaaattatccatttcttttaattttttagtgttattggatatttttgtatgattattgatttgcataggataatgacttttgtatcaagttggtgaacaagtctcgttaaaaaaggcaagtggtttggtgactcgatttattcttgttatttaattcatatatcaatggatcttatttggggcctggtccatatttaacactcgtgttcagtccaatgaccaataatattttttcattaataacaatgtaacaagaatgatacacaaaacattctttgaataagttcgctatgaagaagggaacttatccggtcctagatcatcagttcatacaaacctccatagagttcaacatcttaaacaagaatatcctgatctgaagaatgtggaggctttagtcccttggatacttgggaggctgtggaagaacagaaacgagctggtgcttaaagggagggaatttggaaccaatgaggtattagtaaggacacaagaagatgcagatgagtggattagaaggaaagaggctcagaatgtaaggaaagcaccaaccacaacaccgtcgggacagacgagaaacatgggaagctccaccacaatcttgggttaagtgcaactttgatggggcatggccaacagaaggattaaaatgtggcttagggtgggtgcttcgcgatcatacagggaaggtgttatggttaggtgcaagagctgtggtaaaagtaagaagcgtgctggaagtagaagtggaggctcttagatgggctgtgctgtcattatcccgattcaattataggaagatcatttttgaggtggattctcagcaacttgtgtctttggttacatgaaagttatgcttgtcaagtctcaatccaattatccaagacataaagtatctacttagcaagtttgaggattttatgcttgtgcatacaagccgagaaggaaatggagtggcagatagaatagctaaggaatctctttcttttgagaattatgatctaaagttgtattctattgtaccaatttgggttaaaagctctgttgagctagactcatatgcatcctaggaaacaagttgtaatgagttgctggcctctcttgggattgttcatcaaagtagctgtccctacacaccacaacagaatggtgttgtggagagaaagcacagacacatccttgagatggcaagggcacttaagtttcagagtggtgtacctaccaggttttggggagactgtgtcaagactgttgtatacctgatcaatagactccctactccaatcttacaaggcaaatgtccatatgaactactctatcagaaacatgccaagcttgatcacttgagagtgtttgggtgtcttgcttttgcagcaacactgcccaaaggtgacaaacttgcacctagagccaagcgaaccatcttcattggttattctgagactcaaaagggttacaggttgtatgacttggataataaggtgatcatagtgagcagggatgtagttttcagagagtttcagttccctttcaaagagtccatctcccatgaacctgatatgttcactcgagcaggttcacttagctctgaagatacagctttgcagctagtgtataatgatatttttccttccagctttcatactgatgatgatgatactccagttcttattcctgacattgtagaggccaatgaggatatcactttggggactcattctacccaaaatcatatcacttcagctgatgctgcaccttcaggccacctgcatgctcctgcagagtcagttgagtcagctgagcctgacctagcaaatgctgaatttgagcaccatactgctgtagctgatccctctctagttccagcaaacctgcacactagacctaaacgcaatgcaggtcctcccatctggctcaaggactttgtgacactgaacaaaggctctagggatgttccataccctatagccaactatgtttcctatgatcacttgcctgttcactatcaagcttatttgagtgctttctccacttatactgaacctaaatccttcaaagaagcagctcaagatgagaaatggatggaggccatgtcccttgagatacaggctcttgaggataataacacctgggagattgtccctttaccccctggtaaacagcctatagggtccaaatgggtgtacaaaattaaatacaaagctaatggtgaagttgacaggtttaaggcaaggctagtggccaagggatacactcagcaagaaggccttgactaccatgaaactttttctccagtggccaaaatggtcactgtaaaagctgtcatatctgttgctgcttccaagggctggttccttttccagatggatgtcaacaatgcttttctacaaggtgacctcatggaagaagtttatatgtctctgcctcagggttttcacagccaaggggagaccaaagtgtgcaggctgttgaatccctctatggtttaaagcaagcatcaaggcagtggaacatcaagcttaccactgtccttatgcaggctggttttatgcaaagtgcttatgatcactccttgtttaccaaaagagaggggactgaccttgtcataatcctgatttatgtggatgatctgttaataacaggcagcagcaatgttttgatttcagaagcaaaggcaaccctgcatcagcatttcaagatgaaagatttgggagaactaaaatacttcttaggcattgaggtgctgagatcagaaaagggaatcctactgaaccagaggaagtatgcactggaactgatatcaggtgttggtctgggaggctgcagaccagtgtcaaccccaatggaacagaaccaaaggctgactactgtagaatatgacaagcacttaggaaagactgatgatgcagagttagaggatgtgggttcctatcagagactggtgggaaagcttctctacttgacaatcacaaggccagatatcagctttgcagtgcaggtgctgagtcaattcatgcagcaacccaaacagtcacacctggaagcagcattgagggttgtgaagtacataaaaggttctccaggtgttaggaagcggccgcatgcatatgagtctagctcaacagagcttttaacccaaattggtacaatagaatacaactttagatcataattctcaaaagaaagagattccttagctattctatctgccactccatttccttctcggcttgtatgcacaagcataaaatcctcaaacttgctaagtagatactttatgtcttggataattggattgagacttgacaagcataactttcatgtaaccaaagacacaagttgctgagaatccacctcaaaaatgatcttcctataattgaatcgggataatgacagcacagcccatctaagagcctccacttctacttccagcacgcttcttacttttaccacagctcttgcacctaaccataacaccttccctgtatgatcgcgaagcacccaccctaagccacattttaatccttctgttggccatgccccatcaaagttgcacttaacccaagattgtggtggagcttcccatgtttctcgtctgtcccgacggtgttgtggttggtgctttccttacattctgagcctctttccttctaatccactcatctgcatcttcttgtgtccttactaatacctcattggttccaaattccctccctttaagcaccagctcgtttctgttcttccacagcctcccaagtatccaagggactaaagcctccacattcttcagatcaggatattcttgtttaagatgttgaactctatggaggtttgtatgaactgatgatctaggaccggataagttcccttcttcatagcgaacttattcaaagaatgttttgtgtatcattcttgttacattgttattaatgaaaaaatattattggtcattggactgaacacgagtgttaaatatggaccaggccccaaataagatccattgatatatgaattaaataacaagaataaatcgagtcaccaaaccacttgccttttttaacgagacttgttcaccaacttgatacaaaagtcattatcctatgcaaatcaataatcatacaaaaatatccaataacactaaaaaattaaaagaaatggataatttcacaatatgttatacgataaagaagttacttttccaagaaattcactgattttataagcccacttgcattagataaatggcaaaaaaaaacaaaaaggaaaagaaataaagcacgaagaattctagaaaatacgaaatacgcttcaatgcagtgggacccacggttcaattattgccaattttcagctccaccgtatatttaaaaaataaaacgataatgctaaaaaaatataaatcgtaacgatcgttaaatctcaacggctggatcttatgacgaccgttagaaattgtggttgtcgacgagtcagtaataaacggcgtcaaagtggttgcagccggcacacacgagtcgtgtttatcaactcaaagcacaaatacttttcctcaacctaaaaataaggcaattagccaaaaacaactttgcgtgtaaacaacgctcaatacacgtgtcattttattattagctattgcttcaccgccttagctttctcgtgacctagtcgtcctcgtcttttcttcttcttcttctataaaacaatacccaaagagctcttcttcttcacaattcagatttcaatttctcaaaatcttaaaaactttctctcaattctctctaccgtgatcaaggtaaatttctgtgttccttattctctcaaaatcttcgattttgttttcgttcgatcccaatttcgtatatgttctttggtttagattctgttaatcttagatcgaagacgattttctgggtttgatcgttagatatcatcttaattctcgattagggtttcatagatatcatccgatttgttcaaataatttgagttttgtcgaataattactcttcgatttgtgatttctatctagatctggtgttagtttctagtttgtgcgatcgaatttgtcgattaatctgagtttttctgattaacagggatcatcaacaagtttgtacaaaaaagcaggctctttaaagtatttttacaacaattaccaacaacaacaaacaacaaacaacattacaattactatttacaattacaaaaaaagttaacatggacaagaagtacagcatcggcctggccatcggcaccaactctgtgggctgggccgtgatcaccgacgagtacaaggtgcccagcaagaaattcaaggtgctgggcaacaccgaccggcacagcatcaagaagaacctgatcggcgccctgctgttcgacagcggagaaacagccgaggccacccggctgaagagaaccgccagaagaagatacaccagacggaagaaccggatctgctatctgcaagagatcttcagcaacgagatggccaaggtggacgacagcttcttccacagactggaagagtccttcctggtggaagaggataagaagcacgagcggcaccccatcttcggcaacatcgtggacgaggtggcctaccacgagaagtaccccaccatctaccacctgagaaagaaactggtggacagcaccgacaaggccgacctgcggctgatctatctggccctggcccacatgatcaagttccggggccacttcctgatcgagggcgacctgaaccccgacaacagcgacgtggacaagctgttcatccagctggtgcagacctacaaccagctgttcgaggaaaaccccatcaacgccagcggcgtggacgccaaggccatcctgtctgccagactgagcaagagcagacggctggaaaatctgatcgcccagctgcccggcgagaagaagaatggcctgttcggcaacctgattgccctgagcctgggcctgacccccaacttcaagagcaacttcgacctggccgaggatgccaaactgcagctgagcaaggacacctacgacgacgacctggacaacctgctggcccagatcggcgaccagtacgccgacctgtttctggccgccaagaacctgtccgacgccatcctgctgagcgacatcctgagagtgaacaccgagatcaccaaggcccccctgagcgcctctatgatcaagagatacgacgagcaccaccaggacctgaccctgctgaaagctctcgtgcggcagcagctgcctgagaagtacaaagagattttcttcgaccagagcaagaacggctacgccggctacatcgatggcggagccagccaggaagagttctacaagttcatcaagcccatcctggaaaagatggacggcaccgaggaactgctcgtgaagctgaacagagaggacctgctgcggaagcagcggaccttcgacaacggcagcatcccccaccagatccacctgggagagctgcacgccattctgcggcggcaggaagatttttacccattcctgaaggacaaccgggaaaagatcgagaagatcctgaccttccgcatcccctactacgtgggccctctggccaggggaaacagcagattcgcctggatgaccagaaagagcgaggaaaccatcaccccctggaacttcgaggaagtggtggacaagggcgccagcgcccagagcttcatcgagcggatgaccaacttcgataagaacctgcccaacgagaaggtgctgcccaagcacagcctgctgtacgagtacttcaccgtgtacaacgagctgaccaaagtgaaatacgtgaccgagggaatgagaaagcccgccttcctgagcggcgagcagaaaaaagccatcgtggacctgctgttcaagaccaaccggaaagtgaccgtgaagcagctgaaagaggactacttcaagaaaatcgagtgcttcgactccgtggaaatctccggcgtggaagatcggttcaacgcctccctgggcacataccacgatctgctgaaaattatcaaggacaaggacttcctggacaatgaggaaaacgaggacattctggaagatatcgtgctgaccctgacactgtttgaggacagagagatgatcgaggaacggctgaaaacctatgcccacctgttcgacgacaaagtgatgaagcagctgaagcggcggagatacaccggctggggcaggctgagccggaagctgatcaacggcatccgggacaagcagtccggcaagacaatcctggatttcctgaagtccgacggcttcgccaacagaaacttcatgcagctgatccacgacgacagcctgacctttaaagaggacatccagaaagcccaggtgtccggccagggcgatagcctgcacgagcacattgccaatctggccggcagccccgccattaagaagggcatcctgcagacagtgaaggtggtggacgagctcgtgaaagtgatgggccggcacaagcccgagaacatcgtgatcgaaatggccagagagaaccagaccacccagaagggacagaagaacagccgcgagagaatgaagcggatcgaagagggcatcaaagagctgggcagccagatcctgaaagaacaccccgtggaaaacacccagctgcagaacgagaagctgtacctgtactacctgcagaatgggcgggatatgtacgtggaccaggaactggacatcaaccggctgtccgactacgatgtggacgctatcgtgcctcagagctttctgaaggacgactccatcgataacaaagtgctgactcggagcgacaagaaccggggcaagagcgacaacgtgccctccgaagaggtcgtgaagaagatgaagaactactggcgccagctgctgaatgccaagctgattacccagaggaagttcgacaatctgaccaaggccgagagaggcggcctgagcgaactggataaggccggcttcatcaagagacagctggtggaaacccggcagatcacaaagcacgtggcacagatcctggactcccggatgaacactaagtacgacgagaacgacaaactgatccgggaagtgaaagtgatcaccctgaagtccaagctggtgtccgatttccggaaggatttccagttttacaaagtgcgcgagatcaacaactaccaccacgcccacgacgcctacctgaacgccgtcgtgggaaccgccctgatcaaaaagtaccctaagctggaaagcgagttcgtgtacggcgactacaaggtgtacgacgtgcggaagatgatcgccaagagcgagcaggaaatcggcaaggctaccgccaagtacttcttctacagcaacatcatgaactttttcaagaccgagattaccctggccaacggcgagatccggaagcggcctctgatcgagacaaacggcgaaacaggcgagatcgtgtgggataagggccgggactttgccaccgtgcggaaagtgctgtctatgccccaagtgaatatcgtgaaaaagaccgaggtgcagacaggcggcttcagcaaagagtctatcctgcccaagaggaacagcgacaagctgatcgccagaaagaaggactgggaccctaagaagtacggcggcttcgacagccccaccgtggcctattctgtgctggtggtggccaaagtggaaaagggcaagtccaagaaactgaagagtgtgaaagagctgctggggatcaccatcatggaaagaagcagcttcgagaagaatcccatcgactttctggaagccaagggctacaaagaagtgaaaaaggacctgatcatcaagctgcctaagtactccctgttcgagctggaaaacggccggaagagaatgctggcctctgccggcgaactgcagaagggaaacgaactggccctgccctccaaatatgtgaacttcctgtacctggccagccactatgagaagctgaagggctcccccgaggataatgagcagaaacagctgtttgtggaacagcacaaacactacctggacgagatcatcgagcagatcagcgagttctccaagagagtgatcctggccgacgctaatctggacaaggtgctgagcgcctacaacaagcacagagacaagcctatcagagagcaggccgagaatatcatccacctgtttaccctgaccaatctgggagcccctgccgccttcaagtactttgacaccaccatcgaccggaagaggtacaccagcaccaaagaggtgctggacgccaccctgatccaccagagcatcaccggcctgtacgagacacggatcgacctgtctcagctgggaggcgacgcctatccctatgacgtgcccgattatgccagcctgggcagcggctcccccaagaaaaaacgcaaggtggaagatcctaagaaaaagcggaaagtggaagatgctccaaagaagaagagaaaggtcgacggcattggtagtgggagcaacggcagcagcggatccaacggtccgactgacgccgcggaagaagaacttttgagcaagaattatcatcttgagaacgaagtggctcgtcttaagaaaggttctggcagtggaggttctggctccggaggttccggcggggaagaactgctttcaaagaattaccacctggaaaatgaggtagctagactgaaaaaggggagcggaagtgggggctccgggtcgggcggctctgggggagaggagttgctgagcaaaaattatcatttggagaacgaagtagcacgactaaagaaagggtccggatcgggtggttcaggatctggaggttcgggtggggaggagttactctcgaaaaattatcatctcgaaaacgaagtggctcggctaaaaaagggcagtggttctggaggatctgggtcggggggatccgggggtgaagagctattatctaaaaactaccacctcgaaaatgaggtggcacgcttaaaaaagggaagtggcagtggtgggtcgggatctggcgggtcgggtggagaagagctactatccaagaattatcatcttgagaacgaggtagcgcgtttgaagaagggttccggctcaggaggatctgggtcagggggctcaggaggggaggaactgctctcgaagaactatcatcttgaaaatgaggtcgctcgattaaaaaagggatcgggcagtggtgggtccggctccggtggttcggggggcgaggaactactttcaaagaattaccacctcgaaaacgaagtagctcgattaaagaaaggttcagggtcgggtggctcaggttcgggaggatccggcggtgaagaattactgagtaaaaattatcatctggaaaatgaggtagcgagactaaaaaaggggagtggttctggcggttcgggatctggcgggtcgggaggggaggaattgctatcgaaaaattatcatcttgagaacgaagttgctaggctcaaaaagggctcaggctcaggcgggtccgggtcagggggctcaggtggctaacccgggggcgcgccatgataactagagtcctgctttaatgagatatgcgagacgcctatgatcgcatgatatttgctttcaattctgttgtgcacgttgtaaaaaacctgagcatgtgtagctcagatccttaccgccggtttcggttcattctaatgaatatatcacccgttactatcgtatttttatgaataatattctccgttcaatttactgattgtaccctactacttatatgtacaatattaaaatgaaaacaatatattgtgctgaataggtttatagcgacatctatgatagagcgccacaataacaaacaattgcgttttattattacaaatccaattttaaaaaaagcggcagaaccggtcaaacctaaaagactgattacataaatcttattcaaatttcaaaag

SEQ ID NO: 107 - DNA, 553 bp, Artificial Sequence
  Synthetic Construct
aagctttcgttgaacaacggaaactcgacttgccttccgcacaatacatcatttcttcttagctttttttcttcttcttcgttcatacagtttttttttgtttatcagcttacattttcttgaaccgtagctttcgttttcttctttttaactttccattcggagtttttgtatcttgtttcatagtttgtcccaggattagaatgattaggcatcgaaccttcaagaatttgattgaataaaacatcttcattcttaagatatgaagataatcttcaaaaggcccctgggaatctgaaagaagagaagcaggcccatttatatgggaaagaacaatagtatttcttatataggcccatttaagttgaaaacaatcttcaaaagtcccacatcgcttagataagaaaacgaagctgagtttatatacagctagagtcgaagtagtgattgacggaaagatgtatgggcttgttttagagctagaaatagcaagttaaaataaggctagtccgttatcaacttgaaaaagtggcaccgagtcggtgcttttttt

SEQ ID NO: 108 - DNA, 1994 bp, Artificial Sequence; identical to SEQ ID NO: 81
  Synthetic Construct

SEQ ID NO: 109 - DNA, 115 bp, Artificial Sequence; identical to SEQ ID NO: 33
  Synthetic Construct

SEQ ID NO: 110 - DNA, 4107 bp, Artificial Sequence; identical to SEQ ID NO: 34
  Synthetic Construct

SEQ ID NO: 111 - DNA, 27 bp, Artificial Sequence
  Synthetic Construct
tatccctatgacgtgcccgattatgcc

SEQ ID NO: 112 - DNA, 78 bp, Artificial Sequence
  Synthetic Construct
cccaagaaaaaacgcaaggtggaagatcctaagaaaaagcggaaagtggaagatgctccaaagaagaagagaaaggtc

SEQ ID NO: 113 - DNA, 48 bp, Artificial Sequence; identical to SEQ ID NO: 36
  Synthetic Construct

SEQ ID NO: 114 - DNA, 60 bp, Artificial Sequence; identical to SEQ ID NO: 86
  Synthetic Construct

SEQ ID NO: 115 - DNA, 1236 bp, Artificial Sequence
  Synthetic Construct
gaagaagaacttttgagcaagaattatcatcttgagaacgaagtggctcgtcttaagaaaggttctggcagtggaggttctggctccggatctggtggttcgggctcaggcgggtccggatcaggcgaagaactgctttcaaagaattaccacctggaaaatgaggtagctagactgaaaaaggggagcggaagtgggggctccgggtcgggctcagggggctccggttcgggaggctcagggtcgggggaggagttgctgagcaaaaattatcatttggagaacgaagtagcacgactaaagaaagggtccggatcgggtggttcaggatctggatccggaggatcagggtccggtgggtcgggctcaggagaggagttactctcgaaaaattatcatctcgaaaacgaagtggctcggctaaaaaagggcagtggttctggaggatctgggtcggggtcaggcgggtctggatctgggggatctggatctggtgaagagctattatctaaaaactaccacctcgaaaatgaggtggcacgcttaaaaaagggaagtggcagtggtgggtcgggatctggctctggtggctcaggctcgggaggttcaggttccggggaagagctactatccaagaattatcatcttgagaacgaggtagcgcgtttgaagaagggttccggctcaggaggatctgggtcagggtcagggggttccgggtcaggcgggtccgggtcaggcgaggaactgctctcgaagaactatcatcttgaaaatgaggtcgctcgattaaaaaagggatcgggcagtggtgggtccggctccggttccggaggatcgggatctgggggctcgggatccggggaggaactactttcaaagaattaccacctcgaaaacgaagtagctcgattaaagaaaggttcagggtcgggtggctcaggttcgggatcaggtgggtcaggctccggtggttcaggttcgggagaagaattactgagtaaaaattatcatctggaaaatgaggtagcgagactaaaaaaggggagtggttctggcggttcgggatctggctctgggggctctgggtcgggagggtctgggtctggcgaggaattgctatcgaaaaattatcatcttgagaacgaagttgctaggctcaaaaagggctcaggctcaggcgggtccgggtcagggtcgggaggttccggatccgggggatcaggctcagggtaa

SEQ ID NO: 116 - DNA, 996 bp, Artificial Sequence
  Synthetic Construct
gaagaagaacttttgagcaagaattatcatcttgagaacgaagtggctcgtcttaagaaaggttctggcagtggaggttctggctccggaggttccggcggggaagaactgctttcaaagaattaccacctggaaaatgaggtagctagactgaaaaaggggagcggaagtgggggctccgggtcgggcggctctgggggagaggagttgctgagcaaaaattatcatttggagaacgaagtagcacgactaaagaaagggtccggatcgggtggttcaggatctggaggttcgggtggggaggagttactctcgaaaaattatcatctcgaaaacgaagtggctcggctaaaaaagggcagtggttctggaggatctgggtcggggggatccgggggtgaagagctattatctaaaaactaccacctcgaaaatgaggtggcacgcttaaaaaagggaagtggcagtggtgggtcgggatctggcgggtcgggtggagaagagctactatccaagaattatcatcttgagaacgaggtagcgcgtttgaagaagggttccggctcaggaggatctgggtcagggggctcaggaggggaggaactgctctcgaagaactatcatcttgaaaatgaggtcgctcgattaaaaaagggatcgggcagtggtgggtccggctccggtggttcggggggcgaggaactactttcaaagaattaccacctcgaaaacgaagtagctcgattaaagaaaggttcagggtcgggtggctcaggttcgggaggatccggcggtgaagaattactgagtaaaaattatcatctggaaaatgaggtagcgagactaaaaaaggggagtggttctggcggttcgggatctggcgggtcgggaggggaggaattgctatcgaaaaattatcatcttgagaacgaagttgctaggctcaaaaagggctcaggctcaggcgggtccgggtcagggggctcaggtggctaa

SEQ ID NO: 117 - DNA, 394 bp, Artificial Sequence
  Synthetic Construct
tagagtcctgctttaatgagatatgcgagacgcctatgatcgcatgatatttgctttcaattctgttgtgcacgttgtaaaaaacctgagcatgtgtagctcagatccttaccgccggtttcggttcattctaatgaatatatcacccgttactatcgtatttttatgaataatattctccgttcaatttactgattgtaccctactacttatatgtacaatattaaaatgaaaacaatatattgtgctgaataggtttatagcgacatctatgatagagcgccacaataacaaacaattgcgttttattattacaaatccaattttaaaaaaagcggcagaaccggtcaaacctaaaagactgattacataaatcttattcaaatttcaaaag

SEQ ID NO: 118 - DNA, 2018 bp, Artificial Sequence
  Synthetic Construct
ttcctaacacctggagaaccttttatgtacttcacaaccctcaatgctgcttccaggtgtgactgtttgggttgctgcatgaattgactcagcacctgcactgcaaagctgatatctggccttgtgattgtcaagtagagaagctttcccaccagtctctgataggaacccacatcctctaactctgcatcatcagtctttcctaagtgcttgtcatattctacagtagtcagcctttggttctgttccattggggttgacactggtctgcagcctcccagaccaacacctgatatcagttccagtgcatacttcctctggttcagtaggattcccttttctgatctcagcacctcaatgcctaagaagtattttagttctcccaaatctttcatcttgaaatgctgatgcagggttgcctttgcttctgaaatcaaaacattgctgctgcctgttattaacagatcatccacataaatcaggattatgacaaggtcagtcccctctcttttggtaaacaaggagtgatcataagcactttgcataaaaccagcctgcataaggacagtggtaagcttgatgttccactgccttgatgcttgctttaaaccatagagggattcaacagcctgcacactttggtctccccttggctgtgaaaaccctgaggcagagacatataaacttcttccatgaggtcaccttgtagaaaagcattgttgacatccatctggaaaaggaaccagcccttggaagcagcaacagatatgacagcttttacagtgaccattttggccactggagaaaaagtttcatggtagtcaaggccttcttgctgagtgtatcccttggccactagccttgccttaaacctgtcaacttcaccattagctttgtatttaattttgtacacccatttggaccctataggctgtttaccagggggtaaagggacaatctcccaggtgttattatcctcaagagcctgtatctcaagggacatggcctccatccatttctcatcttgagctgcttctttgaaggatttaggttcagtataagtggagaaagcactcaaataagcttgatagtgaacaggcaagtgatcataggaaacatagttggctatagggtatggaacatccctagagcctttgttcagtgtcacaaagtccttgagccagatgggaggacctgcattgcgtttaggtctagtgtgcaggtttgctggaactagagagggatcagctacagcagtatggtgctcaaattcagcatttgctaggtcaggctcagctgactcaactgactctgcaggagcatgcaggtggcctgaaggtgcagcatcagctgaagtgatatgattttgggtagaatgagtccccaaagtgatatcctcattggcctctacaatgtcaggaataagaactggagtatcatcatcatcagtatgaaagctggaaggaaaaatatcattatacactagctgcaaagctgtatcttcagagctaagtgaacctgctcgagtgaacatatcaggttcatgggagatggactctttgaaagggaactgaaactctctgaaaactacatccctgctcactatgatcaccttattatccaagtcatacaacctgtaacccttttgagtctcagaataaccaatgaagatggttcgcttggctctaggtgcaagtttgtcacctttgggcagtgttgctgcaaaagcaagacacccaaacactctcaagtgatcaagcttggcatgtttctgatagagtagttcatatggacatttgccttgtaagattggagtagggagtctattgatcaggtatacaacagtcttgacacagtctccccaaaacctggtaggtacaccactctgaaacttaagtgcccttgccatctcaaggatgtgtctgtgctttctctccacaacaccattctgttgtggtgtgtagggacagctactttgatgaacaatcccaagagaggccagcaactcattacaactt

SEQ ID NO: 119 - DNA, 831 bp, Artificial Sequence; identical to SEQ ID NO: 90
  Synthetic Construct

SEQ ID NO: 120 - DNA, 711 bp, Artificial Sequence; identical to SEQ ID NO: 91
  Synthetic Construct

SEQ ID NO: 121 - DNA, 2157 bp, Artificial Sequence; identical to SEQ ID NO: 38
  Synthetic Construct

SEQ ID NO: 122 - DNA, 263 bp, Artificial Sequence; identical to SEQ ID NO: 93
  Synthetic Construct

SEQ ID NO: 123 - protein, 1841 aa, Artificial Sequence
  Synthetic Construct
MDKKYSIGLAIGTNSVGWAVITDEYKVPSKKFKVLGNTDRHSIKKNLIGALLFDSGETAEATRLKRTARRRYTRRKNRICYLQEIFSNEMAKVDDSFFHRLEESFLVEEDKKHERHPIFGNIVDEVAYHEKYPTIYHLRKKLVDSTDKADLRLIYLALAHMIKFRGHFLIEGDLNPDNSDVDKLFIQLVQTYNQLFEENPINASGVDAKAILSARLSKSRRLENLIAQLPGEKKNGLFGNLIALSLGLTPNFKSNFDLAEDAKLQLSKDTYDDDLDNLLAQIGDQYADLFLAAKNLSDAILLSDILRVNTEITKAPLSASMIKRYDEHHQDLTLLKALVRQQLPEKYKEIFFDQSKNGYAGYIDGGASQEEFYKFIKPILEKMDGTEELLVKLNREDLLRKQRTFDNGSIPHQIHLGELHAILRRQEDFYPFLKDNREKIEKILTFRIPYYVGPLARGNSRFAWMTRKSEETITPWNFEEVVDKGASAQSFIERMTNFDKNLPNEKVLPKHSLLYEYFTVYNELTKVKYVTEGMRKPAFLSGEQKKAIVDLLFKTNRKVTVKQLKEDYFKKIECFDSVEISGVEDRFNASLGTYHDLLKIIKDKDFLDNEENEDILEDIVLTLTLFEDREMIEERLKTYAHLFDDKVMKQLKRRRYTGWGRLSRKLINGIRDKQSGKTILDFLKSDGFANRNFMQLIHDDSLTFKEDIQKAQVSGQGDSLHEHIANLAGSPAIKKGILQTVKVVDELVKVMGRHKPENIVIEMARENQTTQKGQKNSRERMKRIEEGIKELGSQILKEHPVENTQLQNEKLYLYYLQNGRDMYVDQELDINRLSDYDVDAIVPQSFLKDDSIDNKVLTRSDKNRGKSDNVPSEEVVKKMKNYWRQLLNAKLITQRKFDNLTKAERGGLSELDKAGFIKRQLVETRQITKHVAQILDSRMNTKYDENDKLIREVKVITLKSKLVSDFRKDFQFYKVREINNYHHAHDAYLNAVVGTALIKKYPKLESEFVYGDYKVYDVRKMIAKSEQEIGKATAKYFFYSNIMNFFKTEITLANGEIRKRPLIETNGETGEIVWDKGRDFATVRKVLSMPQVNIVKKTEVQTGGFSKESILPKRNSDKLIARKKDWDPKKYGGFDSPTVAYSVLVVAKVEKGKSKKLKSVKELLGITIMERSSFEKNPIDFLEAKGYKEVKKDLIIKLPKYSLFELENGRKRMLASAGELQKGNELALPSKYVNFLYLASHYEKLKGSPEDNEQKQLFVEQHKHYLDEIIEQISEFSKRVILADANLDKVLSAYNKHRDKPIREQAENIIHLFTLTNLGAPAAFKYFDTTIDRKRYTSTKEVLDATLIHQSITGLYETRIDLSQLGGDAYPYDVPDYASLGSGSPKKKRKVEDPKKKRKVEDAPKKKRKVDGIGSGSNGSSGSNGPTDAAEEELLSKNYHLENEVARLKKGSGSGGSGSGSGGSGSGGSGSGEELLSKNYHLENEVARLKKGSGSGGSGSGSGGSGSGGSGSGEELLSKNYHLENEVARLKKGSGSGGSGSGSGGSGSGGSGSGEELLSKNYHLENEVARLKKGSGSGGSGSGSGGSGSGGSGSGEELLSKNYHLENEVARLKKGSGSGGSGSGSGGSGSGGSGSGEELLSKNYHLENEVARLKKGSGSGGSGSGSGGSGSGGSGSGEELLSKNYHLENEVARLKKGSGSGGSGSGSGGSGSGGSGSGEELLSKNYHLENEVARLKKGSGSGGSGSGSGGSGSGGSGSGEELLSKNYHLENEVARLKKGSGSGGSGSGSGGSGSGGSGSGEELLSKNYHLENEVARLKKGSGSGGSGSGSGGSGSGGSGSG

SEQ ID NO: 124 - protein, 1761 aa, Artificial Sequence
  Synthetic Construct
MDKKYSIGLAIGTNSVGWAVITDEYKVPSKKFKVLGNTDRHSIKKNLIGALLFDSGETAEATRLKRTARRRYTRRKNRICYLQEIFSNEMAKVDDSFFHRLEESFLVEEDKKHERHPIFGNIVDEVAYHEKYPTIYHLRKKLVDSTDKADLRLIYLALAHMIKFRGHFLIEGDLNPDNSDVDKLFIQLVQTYNQLFEENPINASGVDAKAILSARLSKSRRLENLIAQLPGEKKNGLFGNLIALSLGLTPNFKSNFDLAEDAKLQLSKDTYDDDLDNLLAQIGDQYADLFLAAKNLSDAILLSDILRVNTEITKAPLSASMIKRYDEHHQDLTLLKALVRQQLPEKYKEIFFDQSKNGYAGYIDGGASQEEFYKFIKPILEKMDGTEELLVKLNREDLLRKQRTFDNGSIPHQIHLGELHAILRRQEDFYPFLKDNREKIEKILTFRIPYYVGPLARGNSRFAWMTRKSEETITPWNFEEVVDKGASAQSFIERMTNFDKNLPNEKVLPKHSLLYEYFTVYNELTKVKYVTEGMRKPAFLSGEQKKAIVDLLFKTNRKVTVKQLKEDYFKKIECFDSVEISGVEDRFNASLGTYHDLLKIIKDKDFLDNEENEDILEDIVLTLTLFEDREMIEERLKTYAHLFDDKVMKQLKRRRYTGWGRLSRKLINGIRDKQSGKTILDFLKSDGFANRNFMQLIHDDSLTFKEDIQKAQVSGQGDSLHEHIANLAGSPAIKKGILQTVKVVDELVKVMGRHKPENIVIEMARENQTTQKGQKNSRERMKRIEEGIKELGSQILKEHPVENTQLQNEKLYLYYLQNGRDMYVDQELDINRLSDYDVDAIVPQSFLKDDSIDNKVLTRSDKNRGKSDNVPSEEVVKKMKNYWRQLLNAKLITQRKFDNLTKAERGGLSELDKAGFIKRQLVETRQITKHVAQILDSRMNTKYDENDKLIREVKVITLKSKLVSDFRKDFQFYKVREINNYHHAHDAYLNAVVGTALIKKYPKLESEFVYGDYKVYDVRKMIAKSEQEIGKATAKYFFYSNIMNFFKTEITLANGEIRKRPLIETNGETGEIVWDKGRDFATVRKVLSMPQVNIVKKTEVQTGGFSKESILPKRNSDKLIARKKDWDPKKYGGFDSPTVAYSVLVVAKVEKGKSKKLKSVKELLGITIMERSSFEKNPIDFLEAKGYKEVKKDLIIKLPKYSLFELENGRKRMLASAGELQKGNELALPSKYVNFLYLASHYEKLKGSPEDNEQKQLFVEQHKHYLDEIIEQISEFSKRVILADANLDKVLSAYNKHRDKPIREQAENIIHLFTLTNLGAPAAFKYFDTTIDRKRYTSTKEVLDATLIHQSITGLYETRIDLSQLGGDAYPYDVPDYASLGSGSPKKKRKVEDPKKKRKVEDAPKKKRKVDGIGSGSNGSSGSNGPTDAAEEELLSKNYHLENEVARLKKGSGSGGSGSGGSGGEELLSKNYHLENEVARLKKGSGSGGSGSGGSGGEELLSKNYHLENEVARLKKGSGSGGSGSGGSGGEELLSKNYHLENEVARLKKGSGSGGSGSGGSGGEELLSKNYHLENEVARLKKGSGSGGSGSGGSGGEELLSKNYHLENEVARLKKGSGSGGSGSGGSGGEELLSKNYHLENEVARLKKGSGSGGSGSGGSGGEELLSKNYHLENEVARLKKGSGSGGSGSGGSGGEELLSKNYHLENEVARLKKGSGSGGSGSGGSGGEELLSKNYHLENEVARLKKGSGSGGSGSGGSGG

SEQ ID NO: 125 - protein, 1369 aa, Artificial Sequence; identical to SEQ ID NO: 41
  Synthetic Construct

SEQ ID NO: 126 - protein, 9 aa, Artificial Sequence
  Synthetic Construct
YPYDVPDYA

SEQ ID NO: 127 - protein, 26 aa, Artificial Sequence
  Synthetic Construct
PKKKRKVEDPKKKRKVEDAPKKKRKV

SEQ ID NO: 128 - protein, 20 aa, Artificial Sequence
  Synthetic Construct
DGIGSGSNGSSGSNGPTDAA

SEQ ID NO: 129 - protein, 411 aa, Artificial Sequence; identical to SEQ ID NO: 104
  Synthetic Construct

SEQ ID NO: 130 - protein, 331 aa, Artificial Sequence
  Synthetic Construct
EEELLSKNYHLENEVARLKKGSGSGGSGSGGSGGEELLSKNYHLENEVARLKKGSGSGGSGSGGSGGEELLSKNYHLENEVARLKKGSGSGGSGSGGSGGEELLSKNYHLENEVARLKKGSGSGGSGSGGSGGEELLSKNYHLENEVARLKKGSGSGGSGSGGSGGEELLSKNYHLENEVARLKKGSGSGGSGSGGSGGEELLSKNYHLENEVARLKKGSGSGGSGSGGSGGEELLSKNYHLENEVARLKKGSGSGGSGSGGSGGEELLSKNYHLENEVARLKKGSGSGGSGSGGSGGEELLSKNYHLENEVARLKKGSGSGGSGSGGSGG

SEQ ID NO: 131 - protein, 1286 aa, Artificial Sequence; identical to SEQ ID NO: 100
  Synthetic Construct

SEQ ID NO: 132 - protein, 277 aa, Artificial Sequence; identical to SEQ ID NO: 101
  Synthetic Construct

SEQ ID NO: 133 - protein, 237 aa, Artificial Sequence; identical to SEQ ID NO: 102
  Synthetic Construct

SEQ ID NO: 134 - protein, 9 aa, Artificial Sequence
  Synthetic Construct
YPYDVPDYA

SEQ ID NO: 135 - protein, 16 aa, Artificial Sequence
  Synthetic Construct
PKKKRKVEAPKKKRKV

SEQ ID NO: 136 - protein, 6 aa, Artificial Sequence
  Synthetic Construct
GGGGSG

SEQ ID NO: 137 - protein, 718 aa, Artificial Sequence; identical to SEQ ID NO: 8
  Synthetic Construct

SEQ ID NO: 138 - protein, 19 aa, Artificial Sequence
  Synthetic Construct
EELLSKNYHLENEVARLKK

SEQ ID NO: 139 - DNA, 27 bp, Artificial Sequence
  Synthetic Construct
ttggatccaggtggaggtggaagcggt

SEQ ID NO: 140 - DNA, 18 bp, Artificial Sequence
  Synthetic Construct
ggcggtggcggatccggg

SEQ ID NO: 141 - protein, 9 aa, Artificial Sequence
  Synthetic Construct
LDPGGGGSG

SEQ ID NO: 142 - DNA, 17065 bp, Artificial Sequence
  Synthetic Construct
aaaaaaagcaccgactcggtgccactttttcaagttgataacggactagccttattttaacttgctatttctagctctaaaacctactgctatcaatgaggaccaatcactacttcgactctagctgtatataaactcagcttcgttttcttatctaagcgatgtgggacttttgaagattgttttcaacttaaatgggcctatataagaaatactattgttctttcccatataaatgggcctgcttctcttctttcagattcccaggggccttttgaagattatcttcatatcttaagaatgaagatgttttattcaatcaaattcttgaaggttcgatgcctaatcattctaatcctgggacaaactatgaaacaagatacaaaaactccgaatggaaagttaaaaagaagaaaacgaaagctacggttcaagaaaatgtaagctgataaacaaaaaaaaactgtatgaacgaagaagaagaaaaaaagctaagaagaaatgatgtattgtgcggaaggcaagtcgagtttccgttgttcaacgaaagcttaaacgtaacatagatgacaccgcgcgcgataatttatcctagtttgcgcgctatattttgttttctatcgcgtattaaatgtataattgcgggactctaatcataaaaacccatctcataaataacgtcatgcattacatgttaattattacatgcttaacgtaattcaacagaaattatatgataatcatcgcaagaccggcaacaggattcaatcttaagaaactttattgccaaatgtttgaacgatcggggaaattcgagctcaaacttacggccatggcgtaggcggccttttccgttgtgatcttcgcggtctcctccttgtttttggactagtaccaccaccgctaccaccaccttcggttaccgtgaaggttttggtagcgtcgtcgtaggtccattcaccgtcaacaccgttgtcgttagcgtactgtttgaaaactttttccgcggtagcagcgtcaacagcttcggtggtggtttcacctttcagggttttaccgttcaggataagcttgtactcttcggtccgagatcctcctcccgtacgtcagacccaatggttatagggccccgcaacgtgtgtgagagcataaggggacacggtgacaacattgtcatgggttaatgttaatgctttatgagaaggaatttggttcaattcatttacttcagaggactgttctggaccttcattagctgcctggtctttttgctctgaggccttcattttcttattcttagcttctttagcctcaaacttaatcttgtttagttcaaaaccatgttggggcttatttaggtttttgtgctggtaaaagacaagggagaggcgggttggatgattacggttggggtgctcaacaggagtggtagcgtgcagctctcgccgggcacactcaatcaaaaccgagccgtgagcaggtgcgatggccaccccaccaatatttgcatccaaaaagatgtgctcactgtctgaccaatactcatcaatgtggggcaatttctcctcagcaggtgacagggggtcatcagataggggttcgtctgatggaggctcatctgcttcagaatgctgctcatcttcttccattggagaagaggcaaggtcttgaggagaggtgaggaaggagggctggtggtttggctgatgaggcgttagcggctcagtcacaccagtggaaggctcagaattaatgaggggctccatcacaggagcagacagggtggggagaggagccacttcgccaagctgtgaaatgccagggccatcagcagctgcagcattggcaccactgagtcttcccgaaggcatcgtacagtggggagtgctgcttctttctgaaaacccgcatgaggctgttgcgtcattcttcagtggagctggtgtggctgaagcagtcttcggggaccaggagaagcctggagatgcctctttcactgggtgaggagcggatggcatcagcgaataagttttagtgttgtctgaactttttaagataaaatggggttcggtttcactttttacttcaggttgcacggtctcagtgttactccctaaggttggcagtgacgaaggcttactgttgtttgttgttgttgagttattcttccgcttgattcggggaataggtttcttttccactgcccttatcttatgtgcaagaacctctgtcatcatcgcagccctcttctttccagaacggggaacaggctgagtgaaacacgttctttttttgcggcggggtgccaggacctcgatggccccagatttgatcttggcttccattccttccttggagccaaactcatctgtgtctgaaagcttataaagaggtagcacatggagctgctcatcttgaggaataacacccaaagagcggttatcttctcgagttaaggtacaaaccacagtgcttccattattcatgttgtgaatgtccctgtggggatgagcacagaagtccaggcaagcagtgaccccagagaagggtcgaccttccttgctgccaagccgacattctcgggcaacattttcatattccacctgattttggtaagctactggagcatactgcttataaattggagctaatcgtgtagccaaactctgtaagttatcttcaaggtttttttcatgtaagggagagcttggatcaattctaaatcttctggggcttgggcttctaccaaacttacagccattaaagtacatactccatgaacagccaaaagagaatgaagctccacaagtctctggatcaattccttgacatgtacaggtacgattttcattgagggtgcatcttctgtcggtagggtgcccattgtatgactttagattctctgtgagctctgtgtatagccggtcggccattggaagagggatgccatcccacaccatgatgagcaccaccatcacagcagttggacagtggtggcctgtacgctgccggaccaaacaaagaactttttcttcatcactgcttcttcttaaaacccacttagcaattggacacccatgagagcttttcccttctttaccggtgtacactactatttctatccttattgcgtttcctttttgaccatacctattctccatgatttccctgacagcagcaacacttggtcctgccccaaggtgtgtataatatgggcctttgtctttttgtataactcgatcaagacagctgcaggtgggcagcccggatccgccaccgcccactttccgctttttcttaggagcttccaccttgcgttttttcttgggagcgccgctgcccaggctggcataatcgggcacgtcatagggatacgtacgaccggtccgacctccacctttgtagagctcatccatgccatgtgtaatcccagcagcagttacaaactcaagaaggaccatgtggtcacgcttttcgttgggatctttcgaaaggacagattgtgtcgacaggtaatggttgtctggtaaaaggacagggccatcgccaattggagtattttgttgataatggtctgctagttgaacggaaccatcttcaacgttgtggcgaattttgaagttagctttgattccattcttttgtttgtctgccgtgatgtatacattgtgtgagttaaagttgtactcgagtttgtgtccaagaatgtttccatcttctttaaaatcaataccctttaactcgatacgattaacaagggtatcaccttcaaacttgacttcagcacgcgtcttgtaggtcccgtcatctttgaaagatatagtgcgttcctgtacataaccttcgggcatggcactcttgaaaaagtcatgccgtttcatgtgatccggataacgggaaaagcattgaacaccataggtcagagtagtgacaagtgttggccacggaacaggtagttttccagtagtgcaaataaatttaagggtgagttttccgtttgtagcatcaccttcaccctctccacggacagaaaatttgtgcccattaacatcaccatctaattcaacaagaattgggacaactccagtgaaaagttcttctcctttgctaccgcttccacctccacctggatccaagcttccgccgcctcctgaaccaccaccgccactacctcctcccccagaacctccgcctccaccagcgtaatctggaacatcgtatgggtagctgctcacggtcaccagggtgccctggccccagtagtcgaacaggccggtcacgcagtagtacagggcggtgtcgtcgctgcgcaccttgctcatctgcaggtacacggtgttcttgccgttgtccttgctgatgatgaagcggtccttcagggcgctgttgtagtcggtgatgccgtcgccccagatcacgccgatccactccaggccgcggccgggggcctggcgcacccagttcacgccgtagtcggtcaggctgaagccgctcacggcgcagctcagcttcaggctgccgccgggctgcaccaggccgccgccgctctccagcagcttcacctcgctgccgccgccgctgctgccgccgccgccgctgccgccgccgccgctgccgccgccgccgcgcttcagctccaccttggtgccctggccgaacacccagtggttgctgtaccacagggcgcagaagtaggtggcgaagtcctcgggctgcaggctgctgatggtcagggtggccttgtcgccgatcaggctgccgctgaagcggctgggcacgccgggggcgcggttgttggtgccgccgatcaggcccttgaacagcttgccgggcttctcctgcacccagctggcgtagttgctggtggtcacggcgccggtgctgctgcggcaggtgatggtcacgcggtcgcccacgctggcgctcaggctgctggggctctgggtcatcacgatgtcggggcccataaaccctaggtgttaatcagaaaaactcagattaatcgacaaattcgatcgcacaaactagaaactaacaccagatctagatagaaatcacaaatcgaagagtaattattcgacaaaactcaaattatttgaacaaatcggatgatatctatgaaaccctaatcgagaattaagatgatatctaacgatcaaacccagaaaatcgtcttcgatctaagattaacagaatctaaaccaaagaacatatacgaaattgggatcgaacgaaaacaaaatcgaagattttgagagaataaggaacacagaaatttaccttgatcacggtagagagaattgagagaaagtttttaagattttgagaaattgaaatctgaattgtgaagaagaagagctctttgggtattgttttatagaagaagaagaagaaaagacgaggacgactaggtcacgagaaagctaaggcggtgaagcaatagctaataataaaatgacacgtgtattgagcgttgtttacacgcaaagttgtttttggctaattgccttatttttaggttgaggaaaagtatttgtgctttgagttgataaacacgactcgtgtgtgccggctgcaaccactttgacgccgtttattactgactcgtcgacaaccacaatttctaacggtcgtcataagatccagccgttgagatttaacgatcgttacgatttatatttttttagcattatcgttttattttttaaatatacggtggagctgaaaattggcaataattgaaccgtgggtcccactgcattgaagcgtatttcgtattttctagaattcttcgtgctttatttcttttcctttttgtttttttttgccatttatctaatgcaagtgggcttataaaatcagtgaatttcttggaaaagtaacttctttatcgtataacatattgtgaaattatccatttcttttaattttttagtgttattggatatttttgtatgattattgatttgcataggataatgacttttgtatcaagttggtgaacaagtctcgttaaaaaaggcaagtggtttggtgactcgatttattcttgttatttaattcatatatcaatggatcttatttggggcctggtccatatttaacactcgtgttcagtccaatgaccaataatattttttcattaataacaatgtaacaagaatgatacacaaaacattctttgaataagttcgctatgaagaagggaacttatccggtcctagatcatcagttcatacaaacctccatagagttcaacatcttaaacaagaatatcctgatctgaagaatgtggaggctttagtcccttggatacttgggaggctgtggaagaacagaaacgagctggtgcttaaagggagggaatttggaaccaatgaggtattagtaaggacacaagaagatgcagatgagtggattagaaggaaagaggctcagaatgtaaggaaagcaccaaccacaacaccgtcgggacagacgagaaacatgggaagctccaccacaatcttgggttaagtgcaactttgatggggcatggccaacagaaggattaaaatgtggcttagggtgggtgcttcgcgatcatacagggaaggtgttatggttaggtgcaagagctgtggtaaaagtaagaagcgtgctggaagtagaagtggaggctcttagatgggctgtgctgtcattatcccgattcaattataggaagatcatttttgaggtggattctcagcaacttgtgtctttggttacatgaaagttatgcttgtcaagtctcaatccaattatccaagacataaagtatctacttagcaagtttgaggattttatgcttgtgcatacaagccgagaaggaaatggagtggcagatagaatagctaaggaatctctttcttttgagaattatgatctaaagttgtattctattgtaccaatttgggttaaaagctctgttgagctagactcatatgcatcctaggaaacaagttgtaatgagttgctggcctctcttgggattgttcatcaaagtagctgtccctacacaccacaacagaatggtgttgtggagagaaagcacagacacatccttgagatggcaagggcacttaagtttcagagtggtgtacctaccaggttttggggagactgtgtcaagactgttgtatacctgatcaatagactccctactccaatcttacaaggcaaatgtccatatgaactactctatcagaaacatgccaagcttgatcacttgagagtgtttgggtgtcttgcttttgcagcaacactgcccaaaggtgacaaacttgcacctagagccaagcgaaccatcttcattggttattctgagactcaaaagggttacaggttgtatgacttggataataaggtgatcatagtgagcagggatgtagttttcagagagtttcagttccctttcaaagagtccatctcccatgaacctgatatgttcactcgagcaggttcacttagctctgaagatacagctttgcagctagtgtataatgatatttttccttccagctttcatactgatgatgatgatactccagttcttattcctgacattgtagaggccaatgaggatatcactttggggactcattctacccaaaatcatatcacttcagctgatgctgcaccttcaggccacctgcatgctcctgcagagtcagttgagtcagctgagcctgacctagcaaatgctgaatttgagcaccatactgctgtagctgatccctctctagttccagcaaacctgcacactagacctaaacgcaatgcaggtcctcccatctggctcaaggactttgtgacactgaacaaaggctctagggatgttccataccctatagccaactatgtttcctatgatcacttgcctgttcactatcaagcttatttgagtgctttctccacttatactgaacctaaatccttcaaagaagcagctcaagatgagaaatggatggaggccatgtcccttgagatacaggctcttgaggataataacacctgggagattgtccctttaccccctggtaaacagcctatagggtccaaatgggtgtacaaaattaaatacaaagctaatggtgaagttgacaggtttaaggcaaggctagtggccaagggatacactcagcaagaaggccttgactaccatgaaactttttctccagtggccaaaatggtcactgtaaaagctgtcatatctgttgctgcttccaagggctggttccttttccagatggatgtcaacaatgcttttctacaaggtgacctcatggaagaagtttatatgtctctgcctcagggttttcacagccaaggggagaccaaagtgtgcaggctgttgaatccctctatggtttaaagcaagcatcaaggcagtggaacatcaagcttaccactgtccttatgcaggctggttttatgcaaagtgcttatgatcactccttgtttaccaaaagagaggggactgaccttgtcataatcctgatttatgtggatgatctgttaataacaggcagcagcaatgttttgatttcagaagcaaaggcaaccctgcatcagcatttcaagatgaaagatttgggagaactaaaatacttcttaggcattgaggtgctgagatcagaaaagggaatcctactgaaccagaggaagtatgcactggaactgatatcaggtgttggtctgggaggctgcagaccagtgtcaaccccaatggaacagaaccaaaggctgactactgtagaatatgacaagcacttaggaaagactgatgatgcagagttagaggatgtgggttcctatcagagactggtgggaaagcttctctacttgacaatcacaaggccagatatcagctttgcagtgcaggtgctgagtcaattcatgcagcaacccaaacagtcacacctggaagcagcattgagggttgtgaagtacataaaaggttctccaggtgttaggaagcggccgcatgcatatgagtctagctcaacagagcttttaacccaaattggtacaatagaatacaactttagatcataattctcaaaagaaagagattccttagctattctatctgccactccatttccttctcggcttgtatgcacaagcataaaatcctcaaacttgctaagtagatactttatgtcttggataattggattgagacttgacaagcataactttcatgtaaccaaagacacaagttgctgagaatccacctcaaaaatgatcttcctataattgaatcgggataatgacagcacagcccatctaagagcctccacttctacttccagcacgcttcttacttttaccacagctcttgcacctaaccataacaccttccctgtatgatcgcgaagcacccaccctaagccacattttaatccttctgttggccatgccccatcaaagttgcacttaacccaagattgtggtggagcttcccatgtttctcgtctgtcccgacggtgttgtggttggtgctttccttacattctgagcctctttccttctaatccactcatctgcatcttcttgtgtccttactaatacctcattggttccaaattccctccctttaagcaccagctcgtttctgttcttccacagcctcccaagtatccaagggactaaagcctccacattcttcagatcaggatattcttgtttaagatgttgaactctatggaggtttgtatgaactgatgatctaggaccggataagttcccttcttcatagcgaacttattcaaagaatgttttgtgtatcattcttgttacattgttattaatgaaaaaatattattggtcattggactgaacacgagtgttaaatatggaccaggccccaaataagatccattgatatatgaattaaataacaagaataaatcgagtcaccaaaccacttgccttttttaacgagacttgttcaccaacttgatacaaaagtcattatcctatgcaaatcaataatcatacaaaaatatccaataacactaaaaaattaaaagaaatggataatttcacaatatgttatacgataaagaagttacttttccaagaaattcactgattttataagcccacttgcattagataaatggcaaaaaaaaacaaaaaggaaaagaaataaagcacgaagaattctagaaaatacgaaatacgcttcaatgcagtgggacccacggttcaattattgccaattttcagctccaccgtatatttaaaaaataaaacgataatgctaaaaaaatataaatcgtaacgatcgttaaatctcaacggctggatcttatgacgaccgttagaaattgtggttgtcgacgagtcagtaataaacggcgtcaaagtggttgcagccggcacacacgagtcgtgtttatcaactcaaagcacaaatacttttcctcaacctaaaaataaggcaattagccaaaaacaactttgcgtgtaaacaacgctcaatacacgtgtcattttattattagctattgcttcaccgccttagctttctcgtgacctagtcgtcctcgtcttttcttcttcttcttctataaaacaatacccaaagagctcttcttcttcacaattcagatttcaatttctcaaaatcttaaaaactttctctcaattctctctaccgtgatcaaggtaaatttctgtgttccttattctctcaaaatcttcgattttgttttcgttcgatcccaatttcgtatatgttctttggtttagattctgttaatcttagatcgaagacgattttctgggtttgatcgttagatatcatcttaattctcgattagggtttcatagatatcatccgatttgttcaaataatttgagttttgtcgaataattactcttcgatttgtgatttctatctagatctggtgttagtttctagtttgtgcgatcgaatttgtcgattaatctgagtttttctgattaacagggatcatcaacaagtttgtacaaaaaagcaggctctttaaagtatttttacaacaattaccaacaacaacaaacaacaaacaacattacaattactatttacaattacaaaaaaagttaacatggacaagaagtacagcatcggcctggccatcggcaccaactctgtgggctgggccgtgatcaccgacgagtacaaggtgcccagcaagaaattcaaggtgctgggcaacaccgaccggcacagcatcaagaagaacctgatcggcgccctgctgttcgacagcggagaaacagccgaggccacccggctgaagagaaccgccagaagaagatacaccagacggaagaaccggatctgctatctgcaagagatcttcagcaacgagatggccaaggtggacgacagcttcttccacagactggaagagtccttcctggtggaagaggataagaagcacgagcggcaccccatcttcggcaacatcgtggacgaggtggcctaccacgagaagtaccccaccatctaccacctgagaaagaaactggtggacagcaccgacaaggccgacctgcggctgatctatctggccctggcccacatgatcaagttccggggccacttcctgatcgagggcgacctgaaccccgacaacagcgacgtggacaagctgttcatccagctggtgcagacctacaaccagctgttcgaggaaaaccccatcaacgccagcggcgtggacgccaaggccatcctgtctgccagactgagcaagagcagacggctggaaaatctgatcgcccagctgcccggcgagaagaagaatggcctgttcggcaacctgattgccctgagcctgggcctgacccccaacttcaagagcaacttcgacctggccgaggatgccaaactgcagctgagcaaggacacctacgacgacgacctggacaacctgctggcccagatcggcgaccagtacgccgacctgtttctggccgccaagaacctgtccgacgccatcctgctgagcgacatcctgagagtgaacaccgagatcaccaaggcccccctgagcgcctctatgatcaagagatacgacgagcaccaccaggacctgaccctgctgaaagctctcgtgcggcagcagctgcctgagaagtacaaagagattttcttcgaccagagcaagaacggctacgccggctacatcgatggcggagccagccaggaagagttctacaagttcatcaagcccatcctggaaaagatggacggcaccgaggaactgctcgtgaagctgaacagagaggacctgctgcggaagcagcggaccttcgacaacggcagcatcccccaccagatccacctgggagagctgcacgccattctgcggcggcaggaagatttttacccattcctgaaggacaaccgggaaaagatcgagaagatcctgaccttccgcatcccctactacgtgggccctctggccaggggaaacagcagattcgcctggatgaccagaaagagcgaggaaaccatcaccccctggaacttcgaggaagtggtggacaagggcgccagcgcccagagcttcatcgagcggatgaccaacttcgataagaacctgcccaacgagaaggtgctgcccaagcacagcctgctgtacgagtacttcaccgtgtacaacgagctgaccaaagtgaaatacgtgaccgagggaatgagaaagcccgccttcctgagcggcgagcagaaaaaagccatcgtggacctgctgttcaagaccaaccggaaagtgaccgtgaagcagctgaaagaggactacttcaagaaaatcgagtgcttcgactccgtggaaatctccggcgtggaagatcggttcaacgcctccctgggcacataccacgatctgctgaaaattatcaaggacaaggacttcctggacaatgaggaaaacgaggacattctggaagatatcgtgctgaccctgacactgtttgaggacagagagatgatcgaggaacggctgaaaacctatgcccacctgttcgacgacaaagtgatgaagcagctgaagcggcggagatacaccggctggggcaggctgagccggaagctgatcaacggcatccgggacaagcagtccggcaagacaatcctggatttcctgaagtccgacggcttcgccaacagaaacttcatgcagctgatccacgacgacagcctgacctttaaagaggacatccagaaagcccaggtgtccggccagggcgatagcctgcacgagcacattgccaatctggccggcagccccgccattaagaagggcatcctgcagacagtgaaggtggtggacgagctcgtgaaagtgatgggccggcacaagcccgagaacatcgtgatcgaaatggccagagagaaccagaccacccagaagggacagaagaacagccgcgagagaatgaagcggatcgaagagggcatcaaagagctgggcagccagatcctgaaagaacaccccgtggaaaacacccagctgcagaacgagaagctgtacctgtactacctgcagaatgggcgggatatgtacgtggaccaggaactggacatcaaccggctgtccgactacgatgtggacgctatcgtgcctcagagctttctgaaggacgactccatcgataacaaagtgctgactcggagcgacaagaaccggggcaagagcgacaacgtgccctccgaagaggtcgtgaagaagatgaagaactactggcgccagctgctgaatgccaagctgattacccagaggaagttcgacaatctgaccaaggccgagagaggcggcctgagcgaactggataaggccggcttcatcaagagacagctggtggaaacccggcagatcacaaagcacgtggcacagatcctggactcccggatgaacactaagtacgacgagaacgacaaactgatccgggaagtgaaagtgatcaccctgaagtccaagctggtgtccgatttccggaaggatttccagttttacaaagtgcgcgagatcaacaactaccaccacgcccacgacgcctacctgaacgccgtcgtgggaaccgccctgatcaaaaagtaccctaagctggaaagcgagttcgtgtacggcgactacaaggtgtacgacgtgcggaagatgatcgccaagagcgagcaggaaatcggcaaggctaccgccaagtacttcttctacagcaacatcatgaactttttcaagaccgagattaccctggccaacggcgagatccggaagcggcctctgatcgagacaaacggcgaaacaggcgagatcgtgtgggataagggccgggactttgccaccgtgcggaaagtgctgtctatgccccaagtgaatatcgtgaaaaagaccgaggtgcagacaggcggcttcagcaaagagtctatcctgcccaagaggaacagcgacaagctgatcgccagaaagaaggactgggaccctaagaagtacggcggcttcgacagccccaccgtggcctattctgtgctggtggtggccaaagtggaaaagggcaagtccaagaaactgaagagtgtgaaagagctgctggggatcaccatcatggaaagaagcagcttcgagaagaatcccatcgactttctggaagccaagggctacaaagaagtgaaaaaggacctgatcatcaagctgcctaagtactccctgttcgagctggaaaacggccggaagagaatgctggcctctgccggcgaactgcagaagggaaacgaactggccctgccctccaaatatgtgaacttcctgtacctggccagccactatgagaagctgaagggctcccccgaggataatgagcagaaacagctgtttgtggaacagcacaaacactacctggacgagatcatcgagcagatcagcgagttctccaagagagtgatcctggccgacgctaatctggacaaggtgctgagcgcctacaacaagcacagagacaagcctatcagagagcaggccgagaatatcatccacctgtttaccctgaccaatctgggagcccctgccgccttcaagtactttgacaccaccatcgaccggaagaggtacaccagcaccaaagaggtgctggacgccaccctgatccaccagagcatcaccggcctgtacgagacacggatcgacctgtctcagctgggaggcgacgcctatccctatgacgtgcccgattatgccagcctgggcagcggctcccccaagaaaaaacgcaaggtggaagatcctaagaaaaagcggaaagtggaagatgctccaaagaagaagagaaaggtcgacggcattggtagtgggagcaacggcagcagcggatccaacggtccgactgacgccgcggaagaagaacttttgagcaagaattatcatcttgagaacgaagtggctcgtcttaagaaaggttctggcagtggaggttctggctccggatctggtggttcgggctcaggcgggtccggatcaggcgaagaactgctttcaaagaattaccacctggaaaatgaggtagctagactgaaaaaggggagcggaagtgggggctccgggtcgggctcagggggctccggttcgggaggctcagggtcgggggaggagttgctgagcaaaaattatcatttggagaacgaagtagcacgactaaagaaagggtccggatcgggtggttcaggatctggatccggaggatcagggtccggtgggtcgggctcaggagaggagttactctcgaaaaattatcatctcgaaaacgaagtggctcggctaaaaaagggcagtggttctggaggatctgggtcggggtcaggcgggtctggatctgggggatctggatctggtgaagagctattatctaaaaactaccacctcgaaaatgaggtggcacgcttaaaaaagggaagtggcagtggtgggtcgggatctggctctggtggctcaggctcgggaggttcaggttccggggaagagctactatccaagaattatcatcttgagaacgaggtagcgcgtttgaagaagggttccggctcaggaggatctgggtcagggtcagggggttccgggtcaggcgggtccgggtcaggcgaggaactgctctcgaagaactatcatcttgaaaatgaggtcgctcgattaaaaaagggatcgggcagtggtgggtccggctccggttccggaggatcgggatctgggggctcgggatccggggaggaactactttcaaagaattaccacctcgaaaacgaagtagctcgattaaagaaaggttcagggtcgggtggctcaggttcgggatcaggtgggtcaggctccggtggttcaggttcgggagaagaattactgagtaaaaattatcatctggaaaatgaggtagcgagactaaaaaaggggagtggttctggcggttcgggatctggctctgggggctctgggtcgggagggtctgggtctggcgaggaattgctatcgaaaaattatcatcttgagaacgaagttgctaggctcaaaaagggctcaggctcaggcgggtccgggtcagggtcgggaggttccggatccgggggatcaggctcagggtaacccgggggcgcgccatgataactagagtcctgctttaatgagatatgcgagacgcctatgatcgcatgatatttgctttcaattctgttgtgcacgttgtaaaaaacctgagcatgtgtagctcagatccttaccgccggtttcggttcattctaatgaatatatcacccgttactatcgtatttttatgaataatattctccgttcaatttactgattgtaccctactacttatatgtacaatattaaaatgaaaacaatatattgtgctgaataggtttatagcgacatctatgatagagcgccacaataacaaacaattgcgttttattattacaaatccaattttaaaaaaagcggcagaaccggtcaaacctaaaagactgattacataaatcttattcaaatttcaaaag

SEQ ID NO: 143 - DNA, 553 bp, Artificial Sequence
  Synthetic Construct
aagctttcgttgaacaacggaaactcgacttgccttccgcacaatacatcatttcttcttagctttttttcttcttcttcgttcatacagtttttttttgtttatcagcttacattttcttgaaccgtagctttcgttttcttctttttaactttccattcggagtttttgtatcttgtttcatagtttgtcccaggattagaatgattaggcatcgaaccttcaagaatttgattgaataaaacatcttcattcttaagatatgaagataatcttcaaaaggcccctgggaatctgaaagaagagaagcaggcccatttatatgggaaagaacaatagtatttcttatataggcccatttaagttgaaaacaatcttcaaaagtcccacatcgcttagataagaaaacgaagctgagtttatatacagctagagtcgaagtagtgattggtcctcattgatagcagtaggttttagagctagaaatagcaagttaaaataaggctagtccgttatcaacttgaaaaagtggcaccgagtcggtgcttttttt

SEQ ID NO: 144 - DNA, 17065 bp, Artificial Sequence
  Synthetic Construct
aaaaaaagcaccgactcggtgccactttttcaagttgataacggactagccttattttaacttgctatttctagctctaaaacctgatatgggagctagtgtacaatcactacttcgactctagctgtatataaactcagcttcgttttcttatctaagcgatgtgggacttttgaagattgttttcaacttaaatgggcctatataagaaatactattgttctttcccatataaatgggcctgcttctcttctttcagattcccaggggccttttgaagattatcttcatatcttaagaatgaagatgttttattcaatcaaattcttgaaggttcgatgcctaatcattctaatcctgggacaaactatgaaacaagatacaaaaactccgaatggaaagttaaaaagaagaaaacgaaagctacggttcaagaaaatgtaagctgataaacaaaaaaaaactgtatgaacgaagaagaagaaaaaaagctaagaagaaatgatgtattgtgcggaaggcaagtcgagtttccgttgttcaacgaaagcttaaacgtaacatagatgacaccgcgcgcgataatttatcctagtttgcgcgctatattttgttttctatcgcgtattaaatgtataattgcgggactctaatcataaaaacccatctcataaataacgtcatgcattacatgttaattattacatgcttaacgtaattcaacagaaattatatgataatcatcgcaagaccggcaacaggattcaatcttaagaaactttattgccaaatgtttgaacgatcggggaaattcgagctcaaacttacggccatggcgtaggcggccttttccgttgtgatcttcgcggtctcctccttgtttttggactagtaccaccaccgctaccaccaccttcggttaccgtgaaggttttggtagcgtcgtcgtaggtccattcaccgtcaacaccgttgtcgttagcgtactgtttgaaaactttttccgcggtagcagcgtcaacagcttcggtggtggtttcacctttcagggttttaccgttcaggataagcttgtactcttcggtccgagatcctcctcccgtacgtcagacccaatggttatagggccccgcaacgtgtgtgagagcataaggggacacggtgacaacattgtcatgggttaatgttaatgctttatgagaaggaatttggttcaattcatttacttcagaggactgttctggaccttcattagctgcctggtctttttgctctgaggccttcattttcttattcttagcttctttagcctcaaacttaatcttgtttagttcaaaaccatgttggggcttatttaggtttttgtgctggtaaaagacaagggagaggcgggttggatgattacggttggggtgctcaacaggagtggtagcgtgcagctctcgccgggcacactcaatcaaaaccgagccgtgagcaggtgcgatggccaccccaccaatatttgcatccaaaaagatgtgctcactgtctgaccaatactcatcaatgtggggcaatttctcctcagcaggtgacagggggtcatcagataggggttcgtctgatggaggctcatctgcttcagaatgctgctcatcttcttccattggagaagaggcaaggtcttgaggagaggtgaggaaggagggctggtggtttggctgatgaggcgttagcggctcagtcacaccagtggaaggctcagaattaatgaggggctccatcacaggagcagacagggtggggagaggagccacttcgccaagctgtgaaatgccagggccatcagcagctgcagcattggcaccactgagtcttcccgaaggcatcgtacagtggggagtgctgcttctttctgaaaacccgcatgaggctgttgcgtcattcttcagtggagctggtgtggctgaagcagtcttcggggaccaggagaagcctggagatgcctctttcactgggtgaggagcggatggcatcagcgaataagttttagtgttgtctgaactttttaagataaaatggggttcggtttcactttttacttcaggttgcacggtctcagtgttactccctaaggttggcagtgacgaaggcttactgttgtttgttgttgttgagttattcttccgcttgattcggggaataggtttcttttccactgcccttatcttatgtgcaagaacctctgtcatcatcgcagccctcttctttccagaacggggaacaggctgagtgaaacacgttctttttttgcggcggggtgccaggacctcgatggccccagatttgatcttggcttccattccttccttggagccaaactcatctgtgtctgaaagcttataaagaggtagcacatggagctgctcatcttgaggaataacacccaaagagcggttatcttctcgagttaaggtacaaaccacagtgcttccattattcatgttgtgaatgtccctgtggggatgagcacagaagtccaggcaagcagtgaccccagagaagggtcgaccttccttgctgccaagccgacattctcgggcaacattttcatattccacctgattttggtaagctactggagcatactgcttataaattggagctaatcgtgtagccaaactctgtaagttatcttcaaggtttttttcatgtaagggagagcttggatcaattctaaatcttctggggcttgggcttctaccaaacttacagccattaaagtacatactccatgaacagccaaaagagaatgaagctccacaagtctctggatcaattccttgacatgtacaggtacgattttcattgagggtgcatcttctgtcggtagggtgcccattgtatgactttagattctctgtgagctctgtgtatagccggtcggccattggaagagggatgccatcccacaccatgatgagcaccaccatcacagcagttggacagtggtggcctgtacgctgccggaccaaacaaagaactttttcttcatcactgcttcttcttaaaacccacttagcaattggacacccatgagagcttttcccttctttaccggtgtacactactatttctatccttattgcgtttcctttttgaccatacctattctccatgatttccctgacagcagcaacacttggtcctgccccaaggtgtgtataatatgggcctttgtctttttgtataactcgatcaagacagctgcaggtgggcagcccggatccgccaccgcccactttccgctttttcttaggagcttccaccttgcgttttttcttgggagcgccgctgcccaggctggcataatcgggcacgtcatagggatacgtacgaccggtccgacctccacctttgtagagctcatccatgccatgtgtaatcccagcagcagttacaaactcaagaaggaccatgtggtcacgcttttcgttgggatctttcgaaaggacagattgtgtcgacaggtaatggttgtctggtaaaaggacagggccatcgccaattggagtattttgttgataatggtctgctagttgaacggaaccatcttcaacgttgtggcgaattttgaagttagctttgattccattcttttgtttgtctgccgtgatgtatacattgtgtgagttaaagttgtactcgagtttgtgtccaagaatgtttccatcttctttaaaatcaataccctttaactcgatacgattaacaagggtatcaccttcaaacttgacttcagcacgcgtcttgtaggtcccgtcatctttgaaagatatagtgcgttcctgtacataaccttcgggcatggcactcttgaaaaagtcatgccgtttcatgtgatccggataacgggaaaagcattgaacaccataggtcagagtagtgacaagtgttggccacggaacaggtagttttccagtagtgcaaataaatttaagggtgagttttccgtttgtagcatcaccttcaccctctccacggacagaaaatttgtgcccattaacatcaccatctaattcaacaagaattgggacaactccagtgaaaagttcttctcctttgctaccgcttccacctccacctggatccaagcttccgccgcctcctgaaccaccaccgccactacctcctcccccagaacctccgcctccaccagcgtaatctggaacatcgtatgggtagctgctcacggtcaccagggtgccctggccccagtagtcgaacaggccggtcacgcagtagtacagggcggtgtcgtcgctgcgcaccttgctcatctgcaggtacacggtgttcttgccgttgtccttgctgatgatgaagcggtccttcagggcgctgttgtagtcggtgatgccgtcgccccagatcacgccgatccactccaggccgcggccgggggcctggcgcacccagttcacgccgtagtcggtcaggctgaagccgctcacggcgcagctcagcttcaggctgccgccgggctgcaccaggccgccgccgctctccagcagcttcacctcgctgccgccgccgctgctgccgccgccgccgctgccgccgccgccgctgccgccgccgccgcgcttcagctccaccttggtgccctggccgaacacccagtggttgctgtaccacagggcgcagaagtaggtggcgaagtcctcgggctgcaggctgctgatggtcagggtggccttgtcgccgatcaggctgccgctgaagcggctgggcacgccgggggcgcggttgttggtgccgccgatcaggcccttgaacagcttgccgggcttctcctgcacccagctggcgtagttgctggtggtcacggcgccggtgctgctgcggcaggtgatggtcacgcggtcgcccacgctggcgctcaggctgctggggctctgggtcatcacgatgtcggggcccataaaccctaggtgttaatcagaaaaactcagattaatcgacaaattcgatcgcacaaactagaaactaacaccagatctagatagaaatcacaaatcgaagagtaattattcgacaaaactcaaattatttgaacaaatcggatgatatctatgaaaccctaatcgagaattaagatgatatctaacgatcaaacccagaaaatcgtcttcgatctaagattaacagaatctaaaccaaagaacatatacgaaattgggatcgaacgaaaacaaaatcgaagattttgagagaataaggaacacagaaatttaccttgatcacggtagagagaattgagagaaagtttttaagattttgagaaattgaaatctgaattgtgaagaagaagagctctttgggtattgttttatagaagaagaagaagaaaagacgaggacgactaggtcacgagaaagctaaggcggtgaagcaatagctaataataaaatgacacgtgtattgagcgttgtttacacgcaaagttgtttttggctaattgccttatttttaggttgaggaaaagtatttgtgctttgagttgataaacacgactcgtgtgtgccggctgcaaccactttgacgccgtttattactgactcgtcgacaaccacaatttctaacggtcgtcataagatccagccgttgagatttaacgatcgttacgatttatatttttttagcattatcgttttattttttaaatatacggtggagctgaaaattggcaataattgaaccgtgggtcccactgcattgaagcgtatttcgtattttctagaattcttcgtgctttatttcttttcctttttgtttttttttgccatttatctaatgcaagtgggcttataaaatcagtgaatttcttggaaaagtaacttctttatcgtataacatattgtgaaattatccatttcttttaattttttagtgttattggatatttttgtatgattattgatttgcataggataatgacttttgtatcaagttggtgaacaagtctcgttaaaaaaggcaagtggtttggtgactcgatttattcttgttatttaattcatatatcaatggatcttatttggggcctggtccatatttaacactcgtgttcagtccaatgaccaataatattttttcattaataacaatgtaacaagaatgatacacaaaacattctttgaataagttcgctatgaagaagggaacttatccggtcctagatcatcagttcatacaaacctccatagagttcaacatcttaaacaagaatatcctgatctgaagaatgtggaggctttagtcccttggatacttgggaggctgtggaagaacagaaacgagctggtgcttaaagggagggaatttggaaccaatgaggtattagtaaggacacaagaagatgcagatgagtggattagaaggaaagaggctcagaatgtaaggaaagcaccaaccacaacaccgtcgggacagacgagaaacatgggaagctccaccacaatcttgggttaagtgcaactttgatggggcatggccaacagaaggattaaaatgtggcttagggtgggtgcttcgcgatcatacagggaaggtgttatggttaggtgcaagagctgtggtaaaagtaagaagcgtgctggaagtagaagtggaggctcttagatgggctgtgctgtcattatcccgattcaattataggaagatcatttttgaggtggattctcagcaacttgtgtctttggttacatgaaagttatgcttgtcaagtctcaatccaattatccaagacataaagtatctacttagcaagtttgaggattttatgcttgtgcatacaagccgagaaggaaatggagtggcagatagaatagctaaggaatctctttcttttgagaattatgatctaaagttgtattctattgtaccaatttgggttaaaagctctgttgagctagactcatatgcatcctaggaaacaagttgtaatgagttgctggcctctcttgggattgttcatcaaagtagctgtccctacacaccacaacagaatggtgttgtggagagaaagcacagacacatccttgagatggcaagggcacttaagtttcagagtggtgtacctaccaggttttggggagactgtgtcaagactgttgtatacctgatcaatagactccctactccaatcttacaaggcaaatgtccatatgaactactctatcagaaacatgccaagcttgatcacttgagagtgtttgggtgtcttgcttttgcagcaacactgcccaaaggtgacaaacttgcacctagagccaagcgaaccatcttcattggttattctgagactcaaaagggttacaggttgtatgacttggataataaggtgatcatagtgagcagggatgtagttttcagagagtttcagttccctttcaaagagtccatctcccatgaacctgatatgttcactcgagcaggttcacttagctctgaagatacagctttgcagctagtgtataatgatatttttccttccagctttcatactgatgatgatgatactccagttcttattcctgacattgtagaggccaatgaggatatcactttggggactcattctacccaaaatcatatcacttcagctgatgctgcaccttcaggccacctgcatgctcctgcagagtcagttgagtcagctgagcctgacctagcaaatgctgaatttgagcaccatactgctgtagctgatccctctctagttccagcaaacctgcacactagacctaaacgcaatgcaggtcctcccatctggctcaaggactttgtgacactgaacaaaggctctagggatgttccataccctatagccaactatgtttcctatgatcacttgcctgttcactatcaagcttatttgagtgctttctccacttatactgaacctaaatccttcaaagaagcagctcaagatgagaaatggatggaggccatgtcccttgagatacaggctcttgaggataataacacctgggagattgtccctttaccccctggtaaacagcctatagggtccaaatgggtgtacaaaattaaatacaaagctaatggtgaagttgacaggtttaaggcaaggctagtggccaagggatacactcagcaagaaggccttgactaccatgaaactttttctccagtggccaaaatggtcactgtaaaagctgtcatatctgttgctgcttccaagggctggttccttttccagatggatgtcaacaatgcttttctacaaggtgacctcatggaagaagtttatatgtctctgcctcagggttttcacagccaaggggagaccaaagtgtgcaggctgttgaatccctctatggtttaaagcaagcatcaaggcagtggaacatcaagcttaccactgtccttatgcaggctggttttatgcaaagtgcttatgatcactccttgtttaccaaaagagaggggactgaccttgtcataatcctgatttatgtggatgatctgttaataacaggcagcagcaatgttttgatttcagaagcaaaggcaaccctgcatcagcatttcaagatgaaagatttgggagaactaaaatacttcttaggcattgaggtgctgagatcagaaaagggaatcctactgaaccagaggaagtatgcactggaactgatatcaggtgttggtctgggaggctgcagaccagtgtcaaccccaatggaacagaaccaaaggctgactactgtagaatatgacaagcacttaggaaagactgatgatgcagagttagaggatgtgggttcctatcagagactggtgggaaagcttctctacttgacaatcacaaggccagatatcagctttgcagtgcaggtgctgagtcaattcatgcagcaacccaaacagtcacacctggaagcagcattgagggttgtgaagtacataaaaggttctccaggtgttaggaagcggccgcatgcatatgagtctagctcaacagagcttttaacccaaattggtacaatagaatacaactttagatcataattctcaaaagaaagagattccttagctattctatctgccactccatttccttctcggcttgtatgcacaagcataaaatcctcaaacttgctaagtagatactttatgtcttggataattggattgagacttgacaagcataactttcatgtaaccaaagacacaagttgctgagaatccacctcaaaaatgatcttcctataattgaatcgggataatgacagcacagcccatctaagagcctccacttctacttccagcacgcttcttacttttaccacagctcttgcacctaaccataacaccttccctgtatgatcgcgaagcacccaccctaagccacattttaatccttctgttggccatgccccatcaaagttgcacttaacccaagattgtggtggagcttcccatgtttctcgtctgtcccgacggtgttgtggttggtgctttccttacattctgagcctctttccttctaatccactcatctgcatcttcttgtgtccttactaatacctcattggttccaaattccctccctttaagcaccagctcgtttctgttcttccacagcctcccaagtatccaagggactaaagcctccacattcttcagatcaggatattcttgtttaagatgttgaactctatggaggtttgtatgaactgatgatctaggaccggataagttcccttcttcatagcgaacttattcaaagaatgttttgtgtatcattcttgttacattgttattaatgaaaaaatattattggtcattggactgaacacgagtgttaaatatggaccaggccccaaataagatccattgatatatgaattaaataacaagaataaatcgagtcaccaaaccacttgccttttttaacgagacttgttcaccaacttgatacaaaagtcattatcctatgcaaatcaataatcatacaaaaatatccaataacactaaaaaattaaaagaaatggataatttcacaatatgttatacgataaagaagttacttttccaagaaattcactgattttataagcccacttgcattagataaatggcaaaaaaaaacaaaaaggaaaagaaataaagcacgaagaattctagaaaatacgaaatacgcttcaatgcagtgggacccacggttcaattattgccaattttcagctccaccgtatatttaaaaaataaaacgataatgctaaaaaaatataaatcgtaacgatcgttaaatctcaacggctggatcttatgacgaccgttagaaattgtggttgtcgacgagtcagtaataaacggcgtcaaagtggttgcagccggcacacacgagtcgtgtttatcaactcaaagcacaaatacttttcctcaacctaaaaataaggcaattagccaaaaacaactttgcgtgtaaacaacgctcaatacacgtgtcattttattattagctattgcttcaccgccttagctttctcgtgacctagtcgtcctcgtcttttcttcttcttcttctataaaacaatacccaaagagctcttcttcttcacaattcagatttcaatttctcaaaatcttaaaaactttctctcaattctctctaccgtgatcaaggtaaatttctgtgttccttattctctcaaaatcttcgattttgttttcgttcgatcccaatttcgtatatgttctttggtttagattctgttaatcttagatcgaagacgattttctgggtttgatcgttagatatcatcttaattctcgattagggtttcatagatatcatccgatttgttcaaataatttgagttttgtcgaataattactcttcgatttgtgatttctatctagatctggtgttagtttctagtttgtgcgatcgaatttgtcgattaatctgagtttttctgattaacagggatcatcaacaagtttgtacaaaaaagcaggctctttaaagtatttttacaacaattaccaacaacaacaaacaacaaacaacattacaattactatttacaattacaaaaaaagttaacatggacaagaagtacagcatcggcctggccatcggcaccaactctgtgggctgggccgtgatcaccgacgagtacaaggtgcccagcaagaaattcaaggtgctgggcaacaccgaccggcacagcatcaagaagaacctgatcggcgccctgctgttcgacagcggagaaacagccgaggccacccggctgaagagaaccgccagaagaagatacaccagacggaagaaccggatctgctatctgcaagagatcttcagcaacgagatggccaaggtggacgacagcttcttccacagactggaagagtccttcctggtggaagaggataagaagcacgagcggcaccccatcttcggcaacatcgtggacgaggtggcctaccacgagaagtaccccaccatctaccacctgagaaagaaactggtggacagcaccgacaaggccgacctgcggctgatctatctggccctggcccacatgatcaagttccggggccacttcctgatcgagggcgacctgaaccccgacaacagcgacgtggacaagctgttcatccagctggtgcagacctacaaccagctgttcgaggaaaaccccatcaacgccagcggcgtggacgccaaggccatcctgtctgccagactgagcaagagcagacggctggaaaatctgatcgcccagctgcccggcgagaagaagaatggcctgttcggcaacctgattgccctgagcctgggcctgacccccaacttcaagagcaacttcgacctggccgaggatgccaaactgcagctgagcaaggacacctacgacgacgacctggacaacctgctggcccagatcggcgaccagtacgccgacctgtttctggccgccaagaacctgtccgacgccatcctgctgagcgacatcctgagagtgaacaccgagatcaccaaggcccccctgagcgcctctatgatcaagagatacgacgagcaccaccaggacctgaccctgctgaaagctctcgtgcggcagcagctgcctgagaagtacaaagagattttcttcgaccagagcaagaacggctacgccggctacatcgatggcggagccagccaggaagagttctacaagttcatcaagcccatcctggaaaagatggacggcaccgaggaactgctcgtgaagctgaacagagaggacctgctgcggaagcagcggaccttcgacaacggcagcatcccccaccagatccacctgggagagctgcacgccattctgcggcggcaggaagatttttacccattcctgaaggacaaccgggaaaagatcgagaagatcctgaccttccgcatcccctactacgtgggccctctggccaggggaaacagcagattcgcctggatgaccagaaagagcgaggaaaccatcaccccctggaacttcgaggaagtggtggacaagggcgccagcgcccagagcttcatcgagcggatgaccaacttcgataagaacctgcccaacgagaaggtgctgcccaagcacagcctgctgtacgagtacttcaccgtgtacaacgagctgaccaaagtgaaatacgtgaccgagggaatgagaaagcccgccttcctgagcggcgagcagaaaaaagccatcgtggacctgctgttcaagaccaaccggaaagtgaccgtgaagcagctgaaagaggactacttcaagaaaatcgagtgcttcgactccgtggaaatctccggcgtggaagatcggttcaacgcctccctgggcacataccacgatctgctgaaaattatcaaggacaaggacttcctggacaatgaggaaaacgaggacattctggaagatatcgtgctgaccctgacactgtttgaggacagagagatgatcgaggaacggctgaaaacctatgcccacctgttcgacgacaaagtgatgaagcagctgaagcggcggagatacaccggctggggcaggctgagccggaagctgatcaacggcatccgggacaagcagtccggcaagacaatcctggatttcctgaagtccgacggcttcgccaacagaaacttcatgcagctgatccacgacgacagcctgacctttaaagaggacatccagaaagcccaggtgtccggccagggcgatagcctgcacgagcacattgccaatctggccggcagccccgccattaagaagggcatcctgcagacagtgaaggtggtggacgagctcgtgaaagtgatgggccggcacaagcccgagaacatcgtgatcgaaatggccagagagaaccagaccacccagaagggacagaagaacagccgcgagagaatgaagcggatcgaagagggcatcaaagagctgggcagccagatcctgaaagaacaccccgtggaaaacacccagctgcagaacgagaagctgtacctgtactacctgcagaatgggcgggatatgtacgtggaccaggaactggacatcaaccggctgtccgactacgatgtggacgctatcgtgcctcagagctttctgaaggacgactccatcgataacaaagtgctgactcggagcgacaagaaccggggcaagagcgacaacgtgccctccgaagaggtcgtgaagaagatgaagaactactggcgccagctgctgaatgccaagctgattacccagaggaagttcgacaatctgaccaaggccgagagaggcggcctgagcgaactggataaggccggcttcatcaagagacagctggtggaaacccggcagatcacaaagcacgtggcacagatcctggactcccggatgaacactaagtacgacgagaacgacaaactgatccgggaagtgaaagtgatcaccctgaagtccaagctggtgtccgatttccggaaggatttccagttttacaaagtgcgcgagatcaacaactaccaccacgcccacgacgcctacctgaacgccgtcgtgggaaccgccctgatcaaaaagtaccctaagctggaaagcgagttcgtgtacggcgactacaaggtgtacgacgtgcggaagatgatcgccaagagcgagcaggaaatcggcaaggctaccgccaagtacttcttctacagcaacatcatgaactttttcaagaccgagattaccctggccaacggcgagatccggaagcggcctctgatcgagacaaacggcgaaacaggcgagatcgtgtgggataagggccgggactttgccaccgtgcggaaagtgctgtctatgccccaagtgaatatcgtgaaaaagaccgaggtgcagacaggcggcttcagcaaagagtctatcctgcccaagaggaacagcgacaagctgatcgccagaaagaaggactgggaccctaagaagtacggcggcttcgacagccccaccgtggcctattctgtgctggtggtggccaaagtggaaaagggcaagtccaagaaactgaagagtgtgaaagagctgctggggatcaccatcatggaaagaagcagcttcgagaagaatcccatcgactttctggaagccaagggctacaaagaagtgaaaaaggacctgatcatcaagctgcctaagtactccctgttcgagctggaaaacggccggaagagaatgctggcctctgccggcgaactgcagaagggaaacgaactggccctgccctccaaatatgtgaacttcctgtacctggccagccactatgagaagctgaagggctcccccgaggataatgagcagaaacagctgtttgtggaacagcacaaacactacctggacgagatcatcgagcagatcagcgagttctccaagagagtgatcctggccgacgctaatctggacaaggtgctgagcgcctacaacaagcacagagacaagcctatcagagagcaggccgagaatatcatccacctgtttaccctgaccaatctgggagcccctgccgccttcaagtactttgacaccaccatcgaccggaagaggtacaccagcaccaaagaggtgctggacgccaccctgatccaccagagcatcaccggcctgtacgagacacggatcgacctgtctcagctgggaggcgacgcctatccctatgacgtgcccgattatgccagcctgggcagcggctcccccaagaaaaaacgcaaggtggaagatcctaagaaaaagcggaaagtggaagatgctccaaagaagaagagaaaggtcgacggcattggtagtgggagcaacggcagcagcggatccaacggtccgactgacgccgcggaagaagaacttttgagcaagaattatcatcttgagaacgaagtggctcgtcttaagaaaggttctggcagtggaggttctggctccggatctggtggttcgggctcaggcgggtccggatcaggcgaagaactgctttcaaagaattaccacctggaaaatgaggtagctagactgaaaaaggggagcggaagtgggggctccgggtcgggctcagggggctccggttcgggaggctcagggtcgggggaggagttgctgagcaaaaattatcatttggagaacgaagtagcacgactaaagaaagggtccggatcgggtggttcaggatctggatccggaggatcagggtccggtgggtcgggctcaggagaggagttactctcgaaaaattatcatctcgaaaacgaagtggctcggctaaaaaagggcagtggttctggaggatctgggtcggggtcaggcgggtctggatctgggggatctggatctggtgaagagctattatctaaaaactaccacctcgaaaatgaggtggcacgcttaaaaaagggaagtggcagtggtgggtcgggatctggctctggtggctcaggctcgggaggttcaggttccggggaagagctactatccaagaattatcatcttgagaacgaggtagcgcgtttgaagaagggttccggctcaggaggatctgggtcagggtcagggggttccgggtcaggcgggtccgggtcaggcgaggaactgctctcgaagaactatcatcttgaaaatgaggtcgctcgattaaaaaagggatcgggcagtggtgggtccggctccggttccggaggatcgggatctgggggctcgggatccggggaggaactactttcaaagaattaccacctcgaaaacgaagtagctcgattaaagaaaggttcagggtcgggtggctcaggttcgggatcaggtgggtcaggctccggtggttcaggttcgggagaagaattactgagtaaaaattatcatctggaaaatgaggtagcgagactaaaaaaggggagtggttctggcggttcgggatctggctctgggggctctgggtcgggagggtctgggtctggcgaggaattgctatcgaaaaattatcatcttgagaacgaagttgctaggctcaaaaagggctcaggctcaggcgggtccgggtcagggtcgggaggttccggatccgggggatcaggctcagggtaacccgggggcgcgccatgataactagagtcctgctttaatgagatatgcgagacgcctatgatcgcatgatatttgctttcaattctgttgtgcacgttgtaaaaaacctgagcatgtgtagctcagatccttaccgccggtttcggttcattctaatgaatatatcacccgttactatcgtatttttatgaataatattctccgttcaatttactgattgtaccctactacttatatgtacaatattaaaatgaaaacaatatattgtgctgaataggtttatagcgacatctatgatagagcgccacaataacaaacaattgcgttttattattacaaatccaattttaaaaaaagcggcagaaccggtcaaacctaaaagactgattacataaatcttattcaaatttcaaaag

SEQ ID NO: 145 - DNA, 553 bp, Artificial Sequence
  Synthetic Construct
aagctttcgttgaacaacggaaactcgacttgccttccgcacaatacatcatttcttcttagctttttttcttcttcttcgttcatacagtttttttttgtttatcagcttacattttcttgaaccgtagctttcgttttcttctttttaactttccattcggagtttttgtatcttgtttcatagtttgtcccaggattagaatgattaggcatcgaaccttcaagaatttgattgaataaaacatcttcattcttaagatatgaagataatcttcaaaaggcccctgggaatctgaaagaagagaagcaggcccatttatatgggaaagaacaatagtatttcttatataggcccatttaagttgaaaacaatcttcaaaagtcccacatcgcttagataagaaaacgaagctgagtttatatacagctagagtcgaagtagtgattgtacactagctcccatatcaggttttagagctagaaatagcaagttaaaataaggctagtccgttatcaacttgaaaaagtggcaccgagtcggtgcttttttt

SEQ ID NO: 146 - DNA, 5676 bp, Artificial Sequence
  Synthetic Construct
agtctagctcaacagagcttttaacccaaattggtacaatagaatacaactttagatcataattctcaaaagaaagagattccttagctattctatctgccactccatttccttctcggcttgtatgcacaagcataaaatcctcaaacttgctaagtagatactttatgtcttggataattggattgagacttgacaagcataactttcatgtaaccaaagacacaagttgctgagaatccacctcaaaaatgatcttcctataattgaatcgggataatgacagcacagcccatctaagagcctccacttctacttccagcacgcttcttacttttaccacagctcttgcacctaaccataacaccttccctgtatgatcgcgaagcacccaccctaagccacattttaatccttctgttggccatgccccatcaaagttgcacttaacccaagattgtggtggagcttcccatgtttctcgtctgtcccgacggtgttgtggttggtgctttccttacattctgagcctctttccttctaatccactcatctgcatcttcttgtgtccttactaatacctcattggttccaaattccctccctttaagcaccagctcgtttctgttcttccacagcctcccaagtatccaagggactaaagcctccacattcttcagatcaggatattcttgtttaagatgttgaactctatggaggtttgtatgaactgatgatctaggaccggataagttcccttcttcatagcgaacttattcaaagaatgttttgtgtatcattcttgttacattgttattaatgaaaaaatattattggtcattggactgaacacgagtgttaaatatggaccaggccccaaataagatccattgatatatgaattaaataacaagaataaatcgagtcaccaaaccacttgccttttttaacgagacttgttcaccaacttgatacaaaagtcattatcctatgcaaatcaataatcatacaaaaatatccaataacactaaaaaattaaaagaaatggataatttcacaatatgttatacgataaagaagttacttttccaagaaattcactgattttataagcccacttgcattagataaatggcaaaaaaaaacaaaaaggaaaagaaataaagcacgaagaattctagaaaatacgaaatacgcttcaatgcagtgggacccacggttcaattattgccaattttcagctccaccgtatatttaaaaaataaaacgataatgctaaaaaaatataaatcgtaacgatcgttaaatctcaacggctggatcttatgacgaccgttagaaattgtggttgtcgacgagtcagtaataaacggcgtcaaagtggttgcagccggcacacacgagtcgtgtttatcaactcaaagcacaaatacttttcctcaacctaaaaataaggcaattagccaaaaacaactttgcgtgtaaacaacgctcaatacacgtgtcattttattattagctattgcttcaccgccttagctttctcgtgacctagtcgtcctcgtcttttcttcttcttcttctataaaacaatacccaaagagctcttcttcttcacaattcagatttcaatttctcaaaatcttaaaaactttctctcaattctctctaccgtgatcaaggtaaatttctgtgttccttattctctcaaaatcttcgattttgttttcgttcgatcccaatttcgtatatgttctttggtttagattctgttaatcttagatcgaagacgattttctgggtttgatcgttagatatcatcttaattctcgattagggtttcatagatatcatccgatttgttcaaataatttgagttttgtcgaataattactcttcgatttgtgatttctatctagatctggtgttagtttctagtttgtgcgatcgaatttgtcgattaatctgagtttttctgattaacagatggttgagaaaccttacaagtgcccggagtgcggaaagtctttttcacaaaactcaaccttgacggagcatcagcgaacacataccggggaaaagccgtataagtgtccggaatgcgggaaatctttttctaggtctgataacttggtgagacaccagcgtacacacacaggtgaaaagccttacaagtgcccagaatgcggaaagagcttcagcaccaccggcaatctgaccgtacatcagcgaactcatacaggtgagaaaccctataagtgtcctgagtgcggaaaatctttcagccaatcatcaaatttagtgagacatcagaggacccacacaggggagaagccgtataaatgtcccgagtgtgggaaaagtttctctcgatccgataacctggtacgacatcagcgaacccatactggtgagaagccctataaatgccctgaatgcggcaaatccttttccacgtccgggagcctagttaggcatcaacgaacccataccggtaaccgcgccaagcttggtaccgactacaaagacgatgacgacaaagactacaaagacgatgacgacaaagactacaaagacgatgacgacaaaggatcccttgaggttcttttcggcgcgccaagctatcaaacaagtttgtacaaaaaagcaggctccgcggccgcccccttcaccatgggatccctgcccacctgcagctgtcttgatcgagttatacaaaaagacaaaggcccatattatacacaccttggggcaggaccaagtgttgctgctgtcagggaaatcatggagaataggtatggtcaaaaaggaaacgcaataaggatagaaatagtagtgtacaccggtaaagaagggaaaagctctcatgggtgtccaattgctaagtgggttttaagaagaagcagtgatgaagaaaaagttctttgtttggtccggcagcgtacaggccaccactgtccaactgctgtgatggtggtgctcatcatggtgtgggatggcatccctcttccaatggccgaccggctatacacagagctcacagagaatctaaagtcatacaatgggcaccctaccgacagaagatgcaccctcaatgaaaatcgtacctgtacatgtcaaggaattgatccagagacttgtggagcttcattctcttttggctgttcatggagtatgtactttaatggctgtaagtttggtagaagcccaagccccagaagatttagaattgatccaagctctcccttacatgaaaaaaaccttgaagataacttacagagtttggctacacgattagctccaatttataagcagtatgctccagtagcttaccaaaatcaggtggaatatgaaaatgttgcccgagaatgtcggcttggcagcaaggaaggtcgacccttctctggggtcactgcttgcctggacttctgtgctcatccccacagggacattcacaacatgaataatggaagcactgtggtttgtaccttaactcgagaagataaccgctctttgggtgttattcctcaagatgagcagctccatgtgctacctctttataagctttcagacacagatgagtttggctccaaggaaggaatggaagccaagatcaaatctggggccatcgaggtcctggcaccccgccgcaaaaaaagaacgtgtttcactcagcctgttccccgttctggaaagaagagggctgcgatgatgacagaggttcttgcacataagataagggcagtggaaaagaaacctattccccgaatcaagcggaagaataactcaacaacaacaaacaacagtaagccttcgtcactgccaaccttagggagtaacactgagaccgtgcaacctgaagtaaaaagtgaaaccgaaccccattttatcttaaaaagttcagacaacactaaaacttattcgctgatgccatccgctcctcacccagtgaaagaggcatctccaggcttctcctggtccccgaagactgcttcagccacaccagctccactgaagaatgacgcaacagcctcatgcgggttttcagaaagaagcagcactccccactgtacgatgccttcgggaagactcagtggtgccaatgctgcagctgctgatggccctggcatttcacagcttggcgaagtggctcctctccccaccctgtctgctcctgtgatggagcccctcattaattctgagccttccactggtgtgactgagccgctaacgcctcatcagccaaaccaccagccctccttcctcacctctcctcaagaccttgcctcttctccaatggaagaagatgagcagcattctgaagcagatgagcctccatcagacgaacccctatctgatgaccccctgtcacctgctgaggagaaattgccccacattgatgagtattggtcagacagtgagcacatctttttggatgcaaatattggtggggtggccatcgcacctgctcacggctcggttttgattgagtgtgcccggcgagagctgcacgctaccactcctgttgagcaccccaaccgtaatcatccaacccgcctctcccttgtcttttaccagcacaaaaacctaaataagccccaacatggttttgaactaaacaagattaagtttgaggctaaagaagctaagaataagaaaatgaaggcctcagagcaaaaagaccaggcagctaatgaaggtccagaacagtcctctgaagtaaatgaattgaaccaaattccttctcataaagcattaacattaacccatgacaatgttgtcaccgtgtccccttatgctctcacacacgttgcggggccctataaccattgggtctgaaagggtgggcgcgccgacccagctttcttgtacaaagtggttcgataattcttaattaactagttctagagcggccgccaccgcggtggagctcctaggtgagtctagagagttaattaagacccgggactagtccctagagtcctgctttaatgagatatgcgagacgcctatgatcgcatgatatttgctttcaattctgttgtgcacgttgtaaaaaacctgagcatgtgtagctcagatccttaccgccggtttcggttcattctaatgaatatatcacccgttactatcgtatttttatgaataatattctccgttcaatttactgattgtaccctactacttatatgtacaatattaaaatgaaaacaatatattgtgctgaataggtttatagcgacatctatgatagagcgccacaataacaaacaattgcgttttattattacaaatccaattttaaaaaaagcggcagaaccggtcaaacctaaaagactgattacataaatcttattcaaatttcaaaagtgccccaggggctagtatctacgacacaccgagcggcgaactaataacgctcactgaagggaactccggttccccgccggcgcgcatgggtgagattccttgaagttgagtattggccgtccgctctaccgaaagttacgggcaccattcaacccggtccagcacggcggccgggtaaccgacttgctgccccgagaattatgcagcatttttttggtgtatgtgggccccaaatgaagtgcaggtcaaaccttgacagtgacgacaaatcgttgggcgggtccagggcgaattttgcgacgagct

SEQ ID NO: 147 - DNA, 5676 bp, Artificial Sequence
  Synthetic Construct
agtctagctcaacagagcttttaacccaaattggtacaatagaatacaactttagatcataattctcaaaagaaagagattccttagctattctatctgccactccatttccttctcggcttgtatgcacaagcataaaatcctcaaacttgctaagtagatactttatgtcttggataattggattgagacttgacaagcataactttcatgtaaccaaagacacaagttgctgagaatccacctcaaaaatgatcttcctataattgaatcgggataatgacagcacagcccatctaagagcctccacttctacttccagcacgcttcttacttttaccacagctcttgcacctaaccataacaccttccctgtatgatcgcgaagcacccaccctaagccacattttaatccttctgttggccatgccccatcaaagttgcacttaacccaagattgtggtggagcttcccatgtttctcgtctgtcccgacggtgttgtggttggtgctttccttacattctgagcctctttccttctaatccactcatctgcatcttcttgtgtccttactaatacctcattggttccaaattccctccctttaagcaccagctcgtttctgttcttccacagcctcccaagtatccaagggactaaagcctccacattcttcagatcaggatattcttgtttaagatgttgaactctatggaggtttgtatgaactgatgatctaggaccggataagttcccttcttcatagcgaacttattcaaagaatgttttgtgtatcattcttgttacattgttattaatgaaaaaatattattggtcattggactgaacacgagtgttaaatatggaccaggccccaaataagatccattgatatatgaattaaataacaagaataaatcgagtcaccaaaccacttgccttttttaacgagacttgttcaccaacttgatacaaaagtcattatcctatgcaaatcaataatcatacaaaaatatccaataacactaaaaaattaaaagaaatggataatttcacaatatgttatacgataaagaagttacttttccaagaaattcactgattttataagcccacttgcattagataaatggcaaaaaaaaacaaaaaggaaaagaaataaagcacgaagaattctagaaaatacgaaatacgcttcaatgcagtgggacccacggttcaattattgccaattttcagctccaccgtatatttaaaaaataaaacgataatgctaaaaaaatataaatcgtaacgatcgttaaatctcaacggctggatcttatgacgaccgttagaaattgtggttgtcgacgagtcagtaataaacggcgtcaaagtggttgcagccggcacacacgagtcgtgtttatcaactcaaagcacaaatacttttcctcaacctaaaaataaggcaattagccaaaaacaactttgcgtgtaaacaacgctcaatacacgtgtcattttattattagctattgcttcaccgccttagctttctcgtgacctagtcgtcctcgtcttttcttcttcttcttctataaaacaatacccaaagagctcttcttcttcacaattcagatttcaatttctcaaaatcttaaaaactttctctcaattctctctaccgtgatcaaggtaaatttctgtgttccttattctctcaaaatcttcgattttgttttcgttcgatcccaatttcgtatatgttctttggtttagattctgttaatcttagatcgaagacgattttctgggtttgatcgttagatatcatcttaattctcgattagggtttcatagatatcatccgatttgttcaaataatttgagttttgtcgaataattactcttcgatttgtgatttctatctagatctggtgttagtttctagtttgtgcgatcgaatttgtcgattaatctgagtttttctgattaacagatggttgagaagccctataagtgccccgagtgtgggaagtctttcagcagggaagataacctccacactcatcaaagaacgcatacgggagaaaagccttacaaatgtccggaatgtgggaaatcattcagccaatcaagcaatctcgtgagacatcaacgtacacatacaggggaaaaaccatataagtgccccgaatgcggtaagtcattttcacaccgtactactctgacaaaccatcaacgtacccatactggggagaagccttataaatgtcctgagtgtgggaagagcttctctcagagggcgcatttggagcgtcaccagaggacacataccggcgaaaaaccgtacaaatgtcctgaatgtggaaagtcattctcacgtagtgacaatctcgtcaggcaccagcgtactcatactggagagaaaccctacaagtgtcctgaatgtggtaagtccttcagtcaatcctccagcctagtgagacatcaaaggacgcataccgggaaccgcgccaagcttggtaccgactacaaagacgatgacgacaaagactacaaagacgatgacgacaaagactacaaagacgatgacgacaaaggatcccttgaggttcttttcggcgcgccaagctatcaaacaagtttgtacaaaaaagcaggctccgcggccgcccccttcaccatgggatccctgcccacctgcagctgtcttgatcgagttatacaaaaagacaaaggcccatattatacacaccttggggcaggaccaagtgttgctgctgtcagggaaatcatggagaataggtatggtcaaaaaggaaacgcaataaggatagaaatagtagtgtacaccggtaaagaagggaaaagctctcatgggtgtccaattgctaagtgggttttaagaagaagcagtgatgaagaaaaagttctttgtttggtccggcagcgtacaggccaccactgtccaactgctgtgatggtggtgctcatcatggtgtgggatggcatccctcttccaatggccgaccggctatacacagagctcacagagaatctaaagtcatacaatgggcaccctaccgacagaagatgcaccctcaatgaaaatcgtacctgtacatgtcaaggaattgatccagagacttgtggagcttcattctcttttggctgttcatggagtatgtactttaatggctgtaagtttggtagaagcccaagccccagaagatttagaattgatccaagctctcccttacatgaaaaaaaccttgaagataacttacagagtttggctacacgattagctccaatttataagcagtatgctccagtagcttaccaaaatcaggtggaatatgaaaatgttgcccgagaatgtcggcttggcagcaaggaaggtcgacccttctctggggtcactgcttgcctggacttctgtgctcatccccacagggacattcacaacatgaataatggaagcactgtggtttgtaccttaactcgagaagataaccgctctttgggtgttattcctcaagatgagcagctccatgtgctacctctttataagctttcagacacagatgagtttggctccaaggaaggaatggaagccaagatcaaatctggggccatcgaggtcctggcaccccgccgcaaaaaaagaacgtgtttcactcagcctgttccccgttctggaaagaagagggctgcgatgatgacagaggttcttgcacataagataagggcagtggaaaagaaacctattccccgaatcaagcggaagaataactcaacaacaacaaacaacagtaagccttcgtcactgccaaccttagggagtaacactgagaccgtgcaacctgaagtaaaaagtgaaaccgaaccccattttatcttaaaaagttcagacaacactaaaacttattcgctgatgccatccgctcctcacccagtgaaagaggcatctccaggcttctcctggtccccgaagactgcttcagccacaccagctccactgaagaatgacgcaacagcctcatgcgggttttcagaaagaagcagcactccccactgtacgatgccttcgggaagactcagtggtgccaatgctgcagctgctgatggccctggcatttcacagcttggcgaagtggctcctctccccaccctgtctgctcctgtgatggagcccctcattaattctgagccttccactggtgtgactgagccgctaacgcctcatcagccaaaccaccagccctccttcctcacctctcctcaagaccttgcctcttctccaatggaagaagatgagcagcattctgaagcagatgagcctccatcagacgaacccctatctgatgaccccctgtcacctgctgaggagaaattgccccacattgatgagtattggtcagacagtgagcacatctttttggatgcaaatattggtggggtggccatcgcacctgctcacggctcggttttgattgagtgtgcccggcgagagctgcacgctaccactcctgttgagcaccccaaccgtaatcatccaacccgcctctcccttgtcttttaccagcacaaaaacctaaataagccccaacatggttttgaactaaacaagattaagtttgaggctaaagaagctaagaataagaaaatgaaggcctcagagcaaaaagaccaggcagctaatgaaggtccagaacagtcctctgaagtaaatgaattgaaccaaattccttctcataaagcattaacattaacccatgacaatgttgtcaccgtgtccccttatgctctcacacacgttgcggggccctataaccattgggtctgaaagggtgggcgcgccgacccagctttcttgtacaaagtggttcgataattcttaattaactagttctagagcggccgccaccgcggtggagctcctaggtgagtctagagagttaattaagacccgggactagtccctagagtcctgctttaatgagatatgcgagacgcctatgatcgcatgatatttgctttcaattctgttgtgcacgttgtaaaaaacctgagcatgtgtagctcagatccttaccgccggtttcggttcattctaatgaatatatcacccgttactatcgtatttttatgaataatattctccgttcaatttactgattgtaccctactacttatatgtacaatattaaaatgaaaacaatatattgtgctgaataggtttatagcgacatctatgatagagcgccacaataacaaacaattgcgttttattattacaaatccaattttaaaaaaagcggcagaaccggtcaaacctaaaagactgattacataaatcttattcaaatttcaaaagtgccccaggggctagtatctacgacacaccgagcggcgaactaataacgctcactgaagggaactccggttccccgccggcgcgcatgggtgagattccttgaagttgagtattggccgtccgctctaccgaaagttacgggcaccattcaacccggtccagcacggcggccgggtaaccgacttgctgccccgagaattatgcagcatttttttggtgtatgtgggccccaaatgaagtgcaggtcaaaccttgacagtgacgacaaatcgttgggcgggtccagggcgaattttgcgacgagct

SEQ ID NO: 148 - DNA, 510 bp, Artificial Sequence
  Synthetic Construct
atggttgagaaaccttacaagtgcccggagtgcggaaagtctttttcacaaaactcaaccttgacggagcatcagcgaacacataccggggaaaagccgtataagtgtccggaatgcgggaaatctttttctaggtctgataacttggtgagacaccagcgtacacacacaggtgaaaagccttacaagtgcccagaatgcggaaagagcttcagcaccaccggcaatctgaccgtacatcagcgaactcatacaggtgagaaaccctataagtgtcctgagtgcggaaaatctttcagccaatcatcaaatttagtgagacatcagaggacccacacaggggagaagccgtataaatgtcccgagtgtgggaaaagtttctctcgatccgataacctggtacgacatcagcgaacccatactggtgagaagccctataaatgccctgaatgcggcaaatccttttccacgtccgggagcctagttaggcatcaacgaacccataccggt

SEQ ID NO: 149 - DNA, 510 bp, Artificial Sequence
  Synthetic Construct
atggttgagaagccctataagtgccccgagtgtgggaagtctttcagcagggaagataacctccacactcatcaaagaacgcatacgggagaaaagccttacaaatgtccggaatgtgggaaatcattcagccaatcaagcaatctcgtgagacatcaacgtacacatacaggggaaaaaccatataagtgccccgaatgcggtaagtcattttcacaccgtactactctgacaaaccatcaacgtacccatactggggagaagccttataaatgtcctgagtgtgggaagagcttctctcagagggcgcatttggagcgtcaccagaggacacataccggcgaaaaaccgtacaaatgtcctgaatgtggaaagtcattctcacgtagtgacaatctcgtcaggcaccagcgtactcatactggagagaaaccctacaagtgtcctgaatgtggtaagtccttcagtcaatcctccagcctagtgagacatcaaaggacgcataccggg

SEQ ID NO: 150 - protein, 950 aa, Artificial Sequence
  Synthetic Construct
MVEKPYKCPECGKSFSQNSTLTEHQRTHTGEKPYKCPECGKSFSRSDNLVRHQRTHTGEKPYKCPECGKSFSTTGNLTVHQRTHTGEKPYKCPECGKSFSQSSNLVRHQRTHTGEKPYKCPECGKSFSRSDNLVRHQRTHTGEKPYKCPECGKSFSTSGSLVRHQRTHTGNRAKLGTDYKDDDDKDYKDDDDKDYKDDDDKGSLEVLFGAPSYQTSLYKKAGSAAAPFTMGSLPTCSCLDRVIQKDKGPYYTHLGAGPSVAAVREIMENRYGQKGNAIRIEIVVYTGKEGKSSHGCPIAKWVLRRSSDEEKVLCLVRQRTGHHCPTAVMVVLIMVWDGIPLPMADRLYTELTENLKSYNGHPTDRRCTLNENRTCTCQGIDPETCGASFSFGCSWSMYFNGCKFGRSPSPRRFRIDPSSPLHEKNLEDNLQSLATRLAPIYKQYAPVAYQNQVEYENVARECRLGSKEGRPFSGVTACLDFCAHPHRDIHNMNNGSTVVCTLTREDNRSLGVIPQDEQLHVLPLYKLSDTDEFGSKEGMEAKIKSGAIEVLAPRRKKRTCFTQPVPRSGKKRAAMMTEVLAHKIRAVEKKPIPRIKRKNNSTTTNNSKPSSLPTLGSNTETVQPEVKSETEPHFILKSSDNTKTYSLMPSAPHPVKEASPGFSWSPKTASATPAPLKNDATASCGFSERSSTPHCTMPSGRLSGANAAAADGPGISQLGEVAPLPTLSAPVMEPLINSEPSTGVTEPLTPHQPNHQPSFLTSPQDLASSPMEEDEQHSEADEPPSDEPLSDDPLSPAEEKLPHIDEYWSDSEHIFLDANIGGVAIAPAHGSVLIECARRELHATTPVEHPNRNHPTRLSLVFYQHKNLNKPQHGFELNKIKFEAKEAKNKKMKASEQKDQAANEGPEQSSEVNELNQIPSHKALTLTHDNVVTVSPYALTHVAGPYNHWV

SEQ ID NO: 151 - protein, 950 aa, Artificial Sequence
  Synthetic Construct
MVEKPYKCPECGKSFSREDNLHTHQRTHTGEKPYKCPECGKSFSQSSNLVRHQRTHTGEKPYKCPECGKSFSHRTTLTNHQRTHTGEKPYKCPECGKSFSQRAHLERHQRTHTGEKPYKCPECGKSFSRSDNLVRHQRTHTGEKPYKCPECGKSFSQSSSLVRHQRTHTGNRAKLGTDYKDDDDKDYKDDDDKDYKDDDDKGSLEVLFGAPSYQTSLYKKAGSAAAPFTMGSLPTCSCLDRVIQKDKGPYYTHLGAGPSVAAVREIMENRYGQKGNAIRIEIVVYTGKEGKSSHGCPIAKWVLRRSSDEEKVLCLVRQRTGHHCPTAVMVVLIMVWDGIPLPMADRLYTELTENLKSYNGHPTDRRCTLNENRTCTCQGIDPETCGASFSFGCSWSMYFNGCKFGRSPSPRRFRIDPSSPLHEKNLEDNLQSLATRLAPIYKQYAPVAYQNQVEYENVARECRLGSKEGRPFSGVTACLDFCAHPHRDIHNMNNGSTVVCTLTREDNRSLGVIPQDEQLHVLPLYKLSDTDEFGSKEGMEAKIKSGAIEVLAPRRKKRTCFTQPVPRSGKKRAAMMTEVLAHKIRAVEKKPIPRIKRKNNSTTTNNSKPSSLPTLGSNTETVQPEVKSETEPHFILKSSDNTKTYSLMPSAPHPVKEASPGFSWSPKTASATPAPLKNDATASCGFSERSSTPHCTMPSGRLSGANAAAADGPGISQLGEVAPLPTLSAPVMEPLINSEPSTGVTEPLTPHQPNHQPSFLTSPQDLASSPMEEDEQHSEADEPPSDEPLSDDPLSPAEEKLPHIDEYWSDSEHIFLDANIGGVAIAPAHGSVLIECARRELHATTPVEHPNRNHPTRLSLVFYQHKNLNKPQHGFELNKIKFEAKEAKNKKMKASEQKDQAANEGPEQSSEVNELNQIPSHKALTLTHDNVVTVSPYALTHVAGPYNHWV

SEQ ID NO: 152 - protein, 170 aa, Artificial Sequence
  Synthetic Construct
MVEKPYKCPECGKSFSQNSTLTEHQRTHTGEKPYKCPECGKSFSRSDNLVRHQRTHTGEKPYKCPECGKSFSTTGNLTVHQRTHTGEKPYKCPECGKSFSQSSNLVRHQRTHTGEKPYKCPECGKSFSRSDNLVRHQRTHTGEKPYKCPECGKSFSTSGSLVRHQRTHTG

SEQ ID NO: 153 - protein, 170 aa, Artificial Sequence
  Synthetic Construct
MVEKPYKCPECGKSFSREDNLHTHQRTHTGEKPYKCPECGKSFSQSSNLVRHQRTHTGEKPYKCPECGKSFSHRTTLTNHQRTHTGEKPYKCPECGKSFSQRAHLERHQRTHTGEKPYKCPECGKSFSRSDNLVRHQRTHTGEKPYKCPECGKSFSQSSSLVRHQRTHTG

SEQ ID NO: 154 - DNA, 5676 bp, Artificial Sequence
  Synthetic Construct
agtctagctcaacagagcttttaacccaaattggtacaatagaatacaactttagatcataattctcaaaagaaagagattccttagctattctatctgccactccatttccttctcggcttgtatgcacaagcataaaatcctcaaacttgctaagtagatactttatgtcttggataattggattgagacttgacaagcataactttcatgtaaccaaagacacaagttgctgagaatccacctcaaaaatgatcttcctataattgaatcgggataatgacagcacagcccatctaagagcctccacttctacttccagcacgcttcttacttttaccacagctcttgcacctaaccataacaccttccctgtatgatcgcgaagcacccaccctaagccacattttaatccttctgttggccatgccccatcaaagttgcacttaacccaagattgtggtggagcttcccatgtttctcgtctgtcccgacggtgttgtggttggtgctttccttacattctgagcctctttccttctaatccactcatctgcatcttcttgtgtccttactaatacctcattggttccaaattccctccctttaagcaccagctcgtttctgttcttccacagcctcccaagtatccaagggactaaagcctccacattcttcagatcaggatattcttgtttaagatgttgaactctatggaggtttgtatgaactgatgatctaggaccggataagttcccttcttcatagcgaacttattcaaagaatgttttgtgtatcattcttgttacattgttattaatgaaaaaatattattggtcattggactgaacacgagtgttaaatatggaccaggccccaaataagatccattgatatatgaattaaataacaagaataaatcgagtcaccaaaccacttgccttttttaacgagacttgttcaccaacttgatacaaaagtcattatcctatgcaaatcaataatcatacaaaaatatccaataacactaaaaaattaaaagaaatggataatttcacaatatgttatacgataaagaagttacttttccaagaaattcactgattttataagcccacttgcattagataaatggcaaaaaaaaacaaaaaggaaaagaaataaagcacgaagaattctagaaaatacgaaatacgcttcaatgcagtgggacccacggttcaattattgccaattttcagctccaccgtatatttaaaaaataaaacgataatgctaaaaaaatataaatcgtaacgatcgttaaatctcaacggctggatcttatgacgaccgttagaaattgtggttgtcgacgagtcagtaataaacggcgtcaaagtggttgcagccggcacacacgagtcgtgtttatcaactcaaagcacaaatacttttcctcaacctaaaaataaggcaattagccaaaaacaactttgcgtgtaaacaacgctcaatacacgtgtcattttattattagctattgcttcaccgccttagctttctcgtgacctagtcgtcctcgtcttttcttcttcttcttctataaaacaatacccaaagagctcttcttcttcacaattcagatttcaatttctcaaaatcttaaaaactttctctcaattctctctaccgtgatcaaggtaaatttctgtgttccttattctctcaaaatcttcgattttgttttcgttcgatcccaatttcgtatatgttctttggtttagattctgttaatcttagatcgaagacgattttctgggtttgatcgttagatatcatcttaattctcgattagggtttcatagatatcatccgatttgttcaaataatttgagttttgtcgaataattactcttcgatttgtgatttctatctagatctggtgttagtttctagtttgtgcgatcgaatttgtcgattaatctgagtttttctgattaacagatggttgaaaagccgtataaatgccctgagtgtggtaaaagttttagtgacccagggaatcttgtgagacaccagaggactcatacgggggaaaaaccttataagtgtccagagtgtggcaaaagcttctccacgagcggcaacctggtgaggcaccaaaggacgcatacaggtgaaaagccctataaatgcccagagtgtggtaagagttttagcgatcccggtaatctagtgagacatcagagaacacacactggtgaaaaaccatacaaatgccccgaatgcgggaagtctttttcaacaagtgggaacttggtccgacatcagcgtacacacacaggcgagaaaccttataagtgtccggagtgtggtaaatcatttagcacttccggaaacttggtacgtcatcagcgaacacacaccggggagaaaccgtacaaatgcccggaatgcggaaaatcattctccgatccaggcaatttagtaagacatcagcgaacccatacaggtaaccgcgccaagcttggtaccgactacaaagacgatgacgacaaagactacaaagacgatgacgacaaagactacaaagacgatgacgacaaaggatcccttgaggttcttttcggcgcgccaagctatcaaacaagtttgtacaaaaaagcaggctccgcggccgcccccttcaccatgggatccctgcccacctgcagctgtcttgatcgagttatacaaaaagacaaaggcccatattatacacaccttggggcaggaccaagtgttgctgctgtcagggaaatcatggagaataggtatggtcaaaaaggaaacgcaataaggatagaaatagtagtgtacaccggtaaagaagggaaaagctctcatgggtgtccaattgctaagtgggttttaagaagaagcagtgatgaagaaaaagttctttgtttggtccggcagcgtacaggccaccactgtccaactgctgtgatggtggtgctcatcatggtgtgggatggcatccctcttccaatggccgaccggctatacacagagctcacagagaatctaaagtcatacaatgggcaccctaccgacagaagatgcaccctcaatgaaaatcgtacctgtacatgtcaaggaattgatccagagacttgtggagcttcattctcttttggctgttcatggagtatgtactttaatggctgtaagtttggtagaagcccaagccccagaagatttagaattgatccaagctctcccttacatgaaaaaaaccttgaagataacttacagagtttggctacacgattagctccaatttataagcagtatgctccagtagcttaccaaaatcaggtggaatatgaaaatgttgcccgagaatgtcggcttggcagcaaggaaggtcgacccttctctggggtcactgcttgcctggacttctgtgctcatccccacagggacattcacaacatgaataatggaagcactgtggtttgtaccttaactcgagaagataaccgctctttgggtgttattcctcaagatgagcagctccatgtgctacctctttataagctttcagacacagatgagtttggctccaaggaaggaatggaagccaagatcaaatctggggccatcgaggtcctggcaccccgccgcaaaaaaagaacgtgtttcactcagcctgttccccgttctggaaagaagagggctgcgatgatgacagaggttcttgcacataagataagggcagtggaaaagaaacctattccccgaatcaagcggaagaataactcaacaacaacaaacaacagtaagccttcgtcactgccaaccttagggagtaacactgagaccgtgcaacctgaagtaaaaagtgaaaccgaaccccattttatcttaaaaagttcagacaacactaaaacttattcgctgatgccatccgctcctcacccagtgaaagaggcatctccaggcttctcctggtccccgaagactgcttcagccacaccagctccactgaagaatgacgcaacagcctcatgcgggttttcagaaagaagcagcactccccactgtacgatgccttcgggaagactcagtggtgccaatgctgcagctgctgatggccctggcatttcacagcttggcgaagtggctcctctccccaccctgtctgctcctgtgatggagcccctcattaattctgagccttccactggtgtgactgagccgctaacgcctcatcagccaaaccaccagccctccttcctcacctctcctcaagaccttgcctcttctccaatggaagaagatgagcagcattctgaagcagatgagcctccatcagacgaacccctatctgatgaccccctgtcacctgctgaggagaaattgccccacattgatgagtattggtcagacagtgagcacatctttttggatgcaaatattggtggggtggccatcgcacctgctcacggctcggttttgattgagtgtgcccggcgagagctgcacgctaccactcctgttgagcaccccaaccgtaatcatccaacccgcctctcccttgtcttttaccagcacaaaaacctaaataagccccaacatggttttgaactaaacaagattaagtttgaggctaaagaagctaagaataagaaaatgaaggcctcagagcaaaaagaccaggcagctaatgaaggtccagaacagtcctctgaagtaaatgaattgaaccaaattccttctcataaagcattaacattaacccatgacaatgttgtcaccgtgtccccttatgctctcacacacgttgcggggccctataaccattgggtctgaaagggtgggcgcgccgacccagctttcttgtacaaagtggttcgataattcttaattaactagttctagagcggccgccaccgcggtggagctcctaggtgagtctagagagttaattaagacccgggactagtccctagagtcctgctttaatgagatatgcgagacgcctatgatcgcatgatatttgctttcaattctgttgtgcacgttgtaaaaaacctgagcatgtgtagctcagatccttaccgccggtttcggttcattctaatgaatatatcacccgttactatcgtatttttatgaataatattctccgttcaatttactgattgtaccctactacttatatgtacaatattaaaatgaaaacaatatattgtgctgaataggtttatagcgacatctatgatagagcgccacaataacaaacaattgcgttttattattacaaatccaattttaaaaaaagcggcagaaccggtcaaacctaaaagactgattacataaatcttattcaaatttcaaaagtgccccaggggctagtatctacgacacaccgagcggcgaactaataacgctcactgaagggaactccggttccccgccggcgcgcatgggtgagattccttgaagttgagtattggccgtccgctctaccgaaagttacgggcaccattcaacccggtccagcacggcggccgggtaaccgacttgctgccccgagaattatgcagcatttttttggtgtatgtgggccccaaatgaagtgcaggtcaaaccttgacagtgacgacaaatcgttgggcgggtccagggcgaattttgcgacgagct

SEQ ID NO: 155 - DNA, 510 bp, Artificial Sequence
  Synthetic Construct
atggttgaaaagccgtataaatgccctgagtgtggtaaaagttttagtgacccagggaatcttgtgagacaccagaggactcatacgggggaaaaaccttataagtgtccagagtgtggcaaaagcttctccacgagcggcaacctggtgaggcaccaaaggacgcatacaggtgaaaagccctataaatgcccagagtgtggtaagagttttagcgatcccggtaatctagtgagacatcagagaacacacactggtgaaaaaccatacaaatgccccgaatgcgggaagtctttttcaacaagtgggaacttggtccgacatcagcgtacacacacaggcgagaaaccttataagtgtccggagtgtggtaaatcatttagcacttccggaaacttggtacgtcatcagcgaacacacaccggggagaaaccgtacaaatgcccggaatgcggaaaatcattctccgatccaggcaatttagtaagacatcagcgaacccatacaggt

SEQ ID NO: 156 - protein, 950 aa, Artificial Sequence
  Synthetic Construct
MVEKPYKCPECGKSFSDPGNLVRHQRTHTGEKPYKCPECGKSFSTSGNLVRHQRTHTGEKPYKCPECGKSFSDPGNLVRHQRTHTGEKPYKCPECGKSFSTSGNLVRHQRTHTGEKPYKCPECGKSFSTSGNLVRHQRTHTGEKPYKCPECGKSFSDPGNLVRHQRTHTGNRAKLGTDYKDDDDKDYKDDDDKDYKDDDDKGSLEVLFGAPSYQTSLYKKAGSAAAPFTMGSLPTCSCLDRVIQKDKGPYYTHLGAGPSVAAVREIMENRYGQKGNAIRIEIVVYTGKEGKSSHGCPIAKWVLRRSSDEEKVLCLVRQRTGHHCPTAVMVVLIMVWDGIPLPMADRLYTELTENLKSYNGHPTDRRCTLNENRTCTCQGIDPETCGASFSFGCSWSMYFNGCKFGRSPSPRRFRIDPSSPLHEKNLEDNLQSLATRLAPIYKQYAPVAYQNQVEYENVARECRLGSKEGRPFSGVTACLDFCAHPHRDIHNMNNGSTVVCTLTREDNRSLGVIPQDEQLHVLPLYKLSDTDEFGSKEGMEAKIKSGAIEVLAPRRKKRTCFTQPVPRSGKKRAAMMTEVLAHKIRAVEKKPIPRIKRKNNSTTTNNSKPSSLPTLGSNTETVQPEVKSETEPHFILKSSDNTKTYSLMPSAPHPVKEASPGFSWSPKTASATPAPLKNDATASCGFSERSSTPHCTMPSGRLSGANAAAADGPGISQLGEVAPLPTLSAPVMEPLINSEPSTGVTEPLTPHQPNHQPSFLTSPQDLASSPMEEDEQHSEADEPPSDEPLSDDPLSPAEEKLPHIDEYWSDSEHIFLDANIGGVAIAPAHGSVLIECARRELHATTPVEHPNRNHPTRLSLVFYQHKNLNKPQHGFELNKIKFEAKEAKNKKMKASEQKDQAANEGPEQSSEVNELNQIPSHKALTLTHDNVVTVSPYALTHVAGPYNHWV

SEQ ID NO: 157 - protein, 170 aa, Artificial Sequence
  Synthetic Construct
MVEKPYKCPECGKSFSDPGNLVRHQRTHTGEKPYKCPECGKSFSTSGNLVRHQRTHTGEKPYKCPECGKSFSDPGNLVRHQRTHTGEKPYKCPECGKSFSTSGNLVRHQRTHTGEKPYKCPECGKSFSTSGNLVRHQRTHTGEKPYKCPECGKSFSDPGNLVRHQRTHTG

SEQ ID NO: 158 - DNA, 3530 bp, Artificial Sequence
  Synthetic Construct
agtctagctcaacagagcttttaacccaaattggtacaatagaatacaactttagatcataattctcaaaagaaagagattccttagctattctatctgccactccatttccttctcggcttgtatgcacaagcataaaatcctcaaacttgctaagtagatactttatgtcttggataattggattgagacttgacaagcataactttcatgtaaccaaagacacaagttgctgagaatccacctcaaaaatgatcttcctataattgaatcgggataatgacagcacagcccatctaagagcctccacttctacttccagcacgcttcttacttttaccacagctcttgcacctaaccataacaccttccctgtatgatcgcgaagcacccaccctaagccacattttaatccttctgttggccatgccccatcaaagttgcacttaacccaagattgtggtggagcttcccatgtttctcgtctgtcccgacggtgttgtggttggtgctttccttacattctgagcctctttccttctaatccactcatctgcatcttcttgtgtccttactaatacctcattggttccaaattccctccctttaagcaccagctcgtttctgttcttccacagcctcccaagtatccaagggactaaagcctccacattcttcagatcaggatattcttgtttaagatgttgaactctatggaggtttgtatgaactgatgatctaggaccggataagttcccttcttcatagcgaacttattcaaagaatgttttgtgtatcattcttgttacattgttattaatgaaaaaatattattggtcattggactgaacacgagtgttaaatatggaccaggccccaaataagatccattgatatatgaattaaataacaagaataaatcgagtcaccaaaccacttgccttttttaacgagacttgttcaccaacttgatacaaaagtcattatcctatgcaaatcaataatcatacaaaaatatccaataacactaaaaaattaaaagaaatggataatttcacaatatgttatacgataaagaagttacttttccaagaaattcactgattttataagcccacttgcattagataaatggcaaaaaaaaacaaaaaggaaaagaaataaagcacgaagaattctagaaaatacgaaatacgcttcaatgcagtgggacccacggttcaattattgccaattttcagctccaccgtatatttaaaaaataaaacgataatgctaaaaaaatataaatcgtaacgatcgttaaatctcaacggctggatcttatgacgaccgttagaaattgtggttgtcgacgagtcagtaataaacggcgtcaaagtggttgcagccggcacacacgagtcgtgtttatcaactcaaagcacaaatacttttcctcaacctaaaaataaggcaattagccaaaaacaactttgcgtgtaaacaacgctcaatacacgtgtcattttattattagctattgcttcaccgccttagctttctcgtgacctagtcgtcctcgtcttttcttcttcttcttctataaaacaatacccaaagagctcttcttcttcacaattcagatttcaatttctcaaaatcttaaaaactttctctcaattctctctaccgtgatcaaggtaaatttctgtgttccttattctctcaaaatcttcgattttgttttcgttcgatcccaatttcgtatatgttctttggtttagattctgttaatcttagatcgaagacgattttctgggtttgatcgttagatatcatcttaattctcgattagggtttcatagatatcatccgatttgttcaaataatttgagttttgtcgaataattactcttcgatttgtgatttctatctagatctggtgttagtttctagtttgtgcgatcgaatttgtcgattaatctgagtttttctgattaacagacgcgtccatggttgggtaccaacaaatggctggtggacttaacgatatcttcgaagctcagaagattgaatggcatgaggatactggtggatctagcatccccggacttgaggttcttttccaaggacctctcgagccttataaatgccctgagtgtggaaaatctttctctcaatctggagatcttaggaggcaccaaaggacccataccggtgaaaaaccttataaatgccctgagtgtggaaaatcattcagtaggagtgatcatcttaccacccatcagaggacccatactggtgaaaaaccttataaatgccctgagtgtggaaaatcattctcacaatcttcatctcttgttaggcatcagaggactcataccggagaaaaaccttataaatgccctgagtgtggaaaatcattctcaacatctggaaaccttgttaggcaccaaaggacccatactggtgaaaaaccttataaatgccctgagtgtggaaaatcattctctcagagagcaaaccttagggctcatcaaaggacacacactggagaaaaaccttataaatgccctgagtgtggaaaatctttctctaggagtgataagctcaccgagcatcaaaggactcacaccggactcgaggactacaaagacgatgacgacaaagactacaaagacgatgacgacaaagactacaaagacgatgacgacaaaaagcttgatatcgccatggggggcgcgccaagctatcaaacaagtttgtacaaaaaagcaggctccgcggccgcccccttcaccctagaccctttgcctgctgctgctgccgctgtgagcaaaggcgaagagctgttcaccggcgtggtgcccatcctggtggagctggacggcgacgtgaacggccacaagttcagcgtgagcggcgagggcgagggcgacgccacctacggcaagctgaccctgaagctgctgtgcaccaccggcaagctgcccgtgccctggcccaccctggtgaccaccctgggctacggcgtgcagtgcttcgcccggtaccccgaccacatgaagcagcacgacttcttcaagagcgccatgcccgagggctacgtgcaggagcggaccatcttcttcaaggacgacggcaactacaagacccgggccgaggtgaagttcgagggcgacaccctggtgaaccggatcgagctgaagggcatcgacttcaaggaggacggcaacatcctgggccacaagctggagtacaactacaacagccacaacgtgtacatcaccgccgacaagcagaagaacggcatcaaggccaacttcaagatccggcacaacatcgaggacggcggcgtgcagctggccgaccactaccagcagaacacccccatcggcgacggccccgtgctgctgcccgacaaccactacctgagctaccagagcgccctgttcaaggaccccaacgagaagcgggaccacatggtgctgctggagttcctgaccgccgccggcatcaccgagggcatgaacgagctctataattag

SEQ ID NO: 159 - DNA, 747 bp, Artificial Sequence
  Synthetic Construct
ctagaccctttgcctgctgctgctgccgctgtgagcaaaggcgaagagctgttcaccggcgtggtgcccatcctggtggagctggacggcgacgtgaacggccacaagttcagcgtgagcggcgagggcgagggcgacgccacctacggcaagctgaccctgaagctgctgtgcaccaccggcaagctgcccgtgccctggcccaccctggtgaccaccctgggctacggcgtgcagtgcttcgcccggtaccccgaccacatgaagcagcacgacttcttcaagagcgccatgcccgagggctacgtgcaggagcggaccatcttcttcaaggacgacggcaactacaagacccgggccgaggtgaagttcgagggcgacaccctggtgaaccggatcgagctgaagggcatcgacttcaaggaggacggcaacatcctgggccacaagctggagtacaactacaacagccacaacgtgtacatcaccgccgacaagcagaagaacggcatcaaggccaacttcaagatccggcacaacatcgaggacggcggcgtgcagctggccgaccactaccagcagaacacccccatcggcgacggccccgtgctgctgcccgacaaccactacctgagctaccagagcgccctgttcaaggaccccaacgagaagcgggaccacatggtgctgctggagttcctgaccgccgccggcatcaccgagggcatgaacgagctctataattag

SEQ ID NO: 160 - protein, 511 aa, Artificial Sequence
  Synthetic Construct
MVGYQQMAGGLNDIFEAQKIEWHEDTGGSSIPGLEVLFQGPLEPYKCPECGKSFSQSGDLRRHQRTHTGEKPYKCPECGKSFSRSDHLTTHQRTHTGEKPYKCPECGKSFSQSSSLVRHQRTHTGEKPYKCPECGKSFSTSGNLVRHQRTHTGEKPYKCPECGKSFSQRANLRAHQRTHTGEKPYKCPECGKSFSRSDKLTEHQRTHTGLEDYKDDDDKDYKDDDDKDYKDDDDKKLDIAMGGAPSYQTSLYKKAGSAAAPFTLDPLPAAAAAVSKGEELFTGVVPILVELDGDVNGHKFSVSGEGEGDATYGKLTLKLLCTTGKLPVPWPTLVTTLGYGVQCFARYPDHMKQHDFFKSAMPEGYVQERTIFFKDDGNYKTRAEVKFEGDTLVNRIELKGIDFKEDGNILGHKLEYNYNSHNVYITADKQKNGIKANFKIRHNIEDGGVQLADHYQQNTPIGDGPVLLPDNHYLSYQSALFKDPNEKRDHMVLLEFLTAAGITEGMNELYN

SEQ ID NO: 161 - protein, 248 aa, Artificial Sequence
  Synthetic Construct
LDPLPAAAAAVSKGEELFTGVVPILVELDGDVNGHKFSVSGEGEGDATYGKLTLKLLCTTGKLPVPWPTLVTTLGYGVQCFARYPDHMKQHDFFKSAMPEGYVQERTIFFKDDGNYKTRAEVKFEGDTLVNRIELKGIDFKEDGNILGHKLEYNYNSHNVYITADKQKNGIKANFKIRHNIEDGGVQLADHYQQNTPIGDGPVLLPDNHYLSYQSALFKDPNEKRDHMVLLEFLTAAGITEGMNELYN

SEQ ID NO: 162 - DNA, 16530 bp, Artificial Sequence
  Synthetic Construct
cacggggtggtttggtttaaacgtaacatagatgacaccgcgcgcgataatttatcctagtttgcgcgctatattttgttttctatcgcgtattaaatgtataattgcgggactctaatcataaaaacccatctcataaataacgtcatgcattacatgttaattattacatgcttaacgtaattcaacagaaattatatgataatcatcgcaagaccggcaacaggattcaatcttaagaaactttattgccaaatgtttgaacgatcggggaaattcgagctcaaacttacggccatggcgtaggcggccttttccgttgtgatcttcgcggtctcctccttgtttttggactagtaccaccaccgctaccaccaccttcggttaccgtgaaggttttggtagcgtcgtcgtaggtccattcaccgtcaacaccgttgtcgttagcgtactgtttgaaaactttttccgcggtagcagcgtcaacagcttcggtggtggtttcacctttcagggttttaccgttcaggataagcttgtactcttcggtccgagatcctcctcccgtacgtcagacccaatggttatagggccccgcaacgtgtgtgagagcataaggggacacggtgacaacattgtcatgggttaatgttaatgctttatgagaaggaatttggttcaattcatttacttcagaggactgttctggaccttcattagctgcctggtctttttgctctgaggccttcattttcttattcttagcttctttagcctcaaacttaatcttgtttagttcaaaaccatgttggggcttatttaggtttttgtgctggtaaaagacaagggagaggcgggttggatgattacggttggggtgctcaacaggagtggtagcgtgcagctctcgccgggcacactcaatcaaaaccgagccgtgagcaggtgcgatggccaccccaccaatatttgcatccaaaaagatgtgctcactgtctgaccaatactcatcaatgtggggcaatttctcctcagcaggtgacagggggtcatcagataggggttcgtctgatggaggctcatctgcttcagaatgctgctcatcttcttccattggagaagaggcaaggtcttgaggagaggtgaggaaggagggctggtggtttggctgatgaggcgttagcggctcagtcacaccagtggaaggctcagaattaatgaggggctccatcacaggagcagacagggtggggagaggagccacttcgccaagctgtgaaatgccagggccatcagcagctgcagcattggcaccactgagtcttcccgaaggcatcgtacagtggggagtgctgcttctttctgaaaacccgcatgaggctgttgcgtcattcttcagtggagctggtgtggctgaagcagtcttcggggaccaggagaagcctggagatgcctctttcactgggtgaggagcggatggcatcagcgaataagttttagtgttgtctgaactttttaagataaaatggggttcggtttcactttttacttcaggttgcacggtctcagtgttactccctaaggttggcagtgacgaaggcttactgttgtttgttgttgttgagttattcttccgcttgattcggggaataggtttcttttccactgcccttatcttatgtgcaagaacctctgtcatcatcgcagccctcttctttccagaacggggaacaggctgagtgaaacacgttctttttttgcggcggggtgccaggacctcgatggccccagatttgatcttggcttccattccttccttggagccaaactcatctgtgtctgaaagcttataaagaggtagcacatggagctgctcatcttgaggaataacacccaaagagcggttatcttctcgagttaaggtacaaaccacagtgcttccattattcatgttgtgaatgtccctgtggggatgagcacagaagtccaggcaagcagtgaccccagagaagggtcgaccttccttgctgccaagccgacattctcgggcaacattttcatattccacctgattttggtaagctactggagcatactgcttataaattggagctaatcgtgtagccaaactctgtaagttatcttcaaggtttttttcatgtaagggagagcttggatcaattctaaatcttctggggcttgggcttctaccaaacttacagccattaaagtacatactccatgaacagccaaaagagaatgaagctccacaagtctctggatcaattccttgacatgtacaggtacgattttcattgagggtgcatcttctgtcggtagggtgcccattgtatgactttagattctctgtgagctctgtgtatagccggtcggccattggaagagggatgccatcccacaccatgatgagcaccaccatcacagcagttggacagtggtggcctgtacgctgccggaccaaacaaagaactttttcttcatcactgcttcttcttaaaacccacttagcaattggacacccatgagagcttttcccttctttaccggtgtacactactatttctatccttattgcgtttcctttttgaccatacctattctccatgatttccctgacagcagcaacacttggtcctgccccaaggtgtgtataatatgggcctttgtctttttgtataactcgatcaagacagctgcaggtgggcagcccggatccgccaccgcccactttccgctttttcttaggagcttccaccttgcgttttttcttgggagcgccgctgcccaggctggcataatcgggcacgtcatagggatacgtacgaccggtccgacctccacctttgtagagctcatccatgccatgtgtaatcccagcagcagttacaaactcaagaaggaccatgtggtcacgcttttcgttgggatctttcgaaaggacagattgtgtcgacaggtaatggttgtctggtaaaaggacagggccatcgccaattggagtattttgttgataatggtctgctagttgaacggaaccatcttcaacgttgtggcgaattttgaagttagctttgattccattcttttgtttgtctgccgtgatgtatacattgtgtgagttaaagttgtactcgagtttgtgtccaagaatgtttccatcttctttaaaatcaataccctttaactcgatacgattaacaagggtatcaccttcaaacttgacttcagcacgcgtcttgtaggtcccgtcatctttgaaagatatagtgcgttcctgtacataaccttcgggcatggcactcttgaaaaagtcatgccgtttcatgtgatccggataacgggaaaagcattgaacaccataggtcagagtagtgacaagtgttggccacggaacaggtagttttccagtagtgcaaataaatttaagggtgagttttccgtttgtagcatcaccttcaccctctccacggacagaaaatttgtgcccattaacatcaccatctaattcaacaagaattgggacaactccagtgaaaagttcttctcctttgctaccgcttccacctccacctggatccaagcttccgccgcctcctgaaccaccaccgccactacctcctcccccagaacctccgcctccaccagcgtaatctggaacatcgtatgggtagctgctcacggtcaccagggtgccctggccccagtagtcgaacaggccggtcacgcagtagtacagggcggtgtcgtcgctgcgcaccttgctcatctgcaggtacacggtgttcttgccgttgtccttgctgatgatgaagcggtccttcagggcgctgttgtagtcggtgatgccgtcgccccagatcacgccgatccactccaggccgcggccgggggcctggcgcacccagttcacgccgtagtcggtcaggctgaagccgctcacggcgcagctcagcttcaggctgccgccgggctgcaccaggccgccgccgctctccagcagcttcacctcgctgccgccgccgctgctgccgccgccgccgctgccgccgccgccgctgccgccgccgccgcgcttcagctccaccttggtgccctggccgaacacccagtggttgctgtaccacagggcgcagaagtaggtggcgaagtcctcgggctgcaggctgctgatggtcagggtggccttgtcgccgatcaggctgccgctgaagcggctgggcacgccgggggcgcggttgttggtgccgccgatcaggcccttgaacagcttgccgggcttctcctgcacccagctggcgtagttgctggtggtcacggcgccggtgctgctgcggcaggtgatggtcacgcggtcgcccacgctggcgctcaggctgctggggctctgggtcatcacgatgtcggggcccataaaccctaggtgttaatcagaaaaactcagattaatcgacaaattcgatcgcacaaactagaaactaacaccagatctagatagaaatcacaaatcgaagagtaattattcgacaaaactcaaattatttgaacaaatcggatgatatctatgaaaccctaatcgagaattaagatgatatctaacgatcaaacccagaaaatcgtcttcgatctaagattaacagaatctaaaccaaagaacatatacgaaattgggatcgaacgaaaacaaaatcgaagattttgagagaataaggaacacagaaatttaccttgatcacggtagagagaattgagagaaagtttttaagattttgagaaattgaaatctgaattgtgaagaagaagagctctttgggtattgttttatagaagaagaagaagaaaagacgaggacgactaggtcacgagaaagctaaggcggtgaagcaatagctaataataaaatgacacgtgtattgagcgttgtttacacgcaaagttgtttttggctaattgccttatttttaggttgaggaaaagtatttgtgctttgagttgataaacacgactcgtgtgtgccggctgcaaccactttgacgccgtttattactgactcgtcgacaaccacaatttctaacggtcgtcataagatccagccgttgagatttaacgatcgttacgatttatatttttttagcattatcgttttattttttaaatatacggtggagctgaaaattggcaataattgaaccgtgggtcccactgcattgaagcgtatttcgtattttctagaattcttcgtgctttatttcttttcctttttgtttttttttgccatttatctaatgcaagtgggcttataaaatcagtgaatttcttggaaaagtaacttctttatcgtataacatattgtgaaattatccatttcttttaattttttagtgttattggatatttttgtatgattattgatttgcataggataatgacttttgtatcaagttggtgaacaagtctcgttaaaaaaggcaagtggtttggtgactcgatttattcttgttatttaattcatatatcaatggatcttatttggggcctggtccatatttaacactcgtgttcagtccaatgaccaataatattttttcattaataacaatgtaacaagaatgatacacaaaacattctttgaataagttcgctatgaagaagggaacttatccggtcctagatcatcagttcatacaaacctccatagagttcaacatcttaaacaagaatatcctgatctgaagaatgtggaggctttagtcccttggatacttgggaggctgtggaagaacagaaacgagctggtgcttaaagggagggaatttggaaccaatgaggtattagtaaggacacaagaagatgcagatgagtggattagaaggaaagaggctcagaatgtaaggaaagcaccaaccacaacaccgtcgggacagacgagaaacatgggaagctccaccacaatcttgggttaagtgcaactttgatggggcatggccaacagaaggattaaaatgtggcttagggtgggtgcttcgcgatcatacagggaaggtgttatggttaggtgcaagagctgtggtaaaagtaagaagcgtgctggaagtagaagtggaggctcttagatgggctgtgctgtcattatcccgattcaattataggaagatcatttttgaggtggattctcagcaacttgtgtctttggttacatgaaagttatgcttgtcaagtctcaatccaattatccaagacataaagtatctacttagcaagtttgaggattttatgcttgtgcatacaagccgagaaggaaatggagtggcagatagaatagctaaggaatctctttcttttgagaattatgatctaaagttgtattctattgtaccaatttgggttaaaagctctgttgagctagactcatatgcatcctaggaaacaagttgtaatgagttgctggcctctcttgggattgttcatcaaagtagctgtccctacacaccacaacagaatggtgttgtggagagaaagcacagacacatccttgagatggcaagggcacttaagtttcagagtggtgtacctaccaggttttggggagactgtgtcaagactgttgtatacctgatcaatagactccctactccaatcttacaaggcaaatgtccatatgaactactctatcagaaacatgccaagcttgatcacttgagagtgtttgggtgtcttgcttttgcagcaacactgcccaaaggtgacaaacttgcacctagagccaagcgaaccatcttcattggttattctgagactcaaaagggttacaggttgtatgacttggataataaggtgatcatagtgagcagggatgtagttttcagagagtttcagttccctttcaaagagtccatctcccatgaacctgatatgttcactcgagcaggttcacttagctctgaagatacagctttgcagctagtgtataatgatatttttccttccagctttcatactgatgatgatgatactccagttcttattcctgacattgtagaggccaatgaggatatcactttggggactcattctacccaaaatcatatcacttcagctgatgctgcaccttcaggccacctgcatgctcctgcagagtcagttgagtcagctgagcctgacctagcaaatgctgaatttgagcaccatactgctgtagctgatccctctctagttccagcaaacctgcacactagacctaaacgcaatgcaggtcctcccatctggctcaaggactttgtgacactgaacaaaggctctagggatgttccataccctatagccaactatgtttcctatgatcacttgcctgttcactatcaagcttatttgagtgctttctccacttatactgaacctaaatccttcaaagaagcagctcaagatgagaaatggatggaggccatgtcccttgagatacaggctcttgaggataataacacctgggagattgtccctttaccccctggtaaacagcctatagggtccaaatgggtgtacaaaattaaatacaaagctaatggtgaagttgacaggtttaaggcaaggctagtggccaagggatacactcagcaagaaggccttgactaccatgaaactttttctccagtggccaaaatggtcactgtaaaagctgtcatatctgttgctgcttccaagggctggttccttttccagatggatgtcaacaatgcttttctacaaggtgacctcatggaagaagtttatatgtctctgcctcagggttttcacagccaaggggagaccaaagtgtgcaggctgttgaatccctctatggtttaaagcaagcatcaaggcagtggaacatcaagcttaccactgtccttatgcaggctggttttatgcaaagtgcttatgatcactccttgtttaccaaaagagaggggactgaccttgtcataatcctgatttatgtggatgatctgttaataacaggcagcagcaatgttttgatttcagaagcaaaggcaaccctgcatcagcatttcaagatgaaagatttgggagaactaaaatacttcttaggcattgaggtgctgagatcagaaaagggaatcctactgaaccagaggaagtatgcactggaactgatatcaggtgttggtctgggaggctgcagaccagtgtcaaccccaatggaacagaaccaaaggctgactactgtagaatatgacaagcacttaggaaagactgatgatgcagagttagaggatgtgggttcctatcagagactggtgggaaagcttctctacttgacaatcacaaggccagatatcagctttgcagtgcaggtgctgagtcaattcatgcagcaacccaaacagtcacacctggaagcagcattgagggttgtgaagtacataaaaggttctccaggtgttaggaagcggccgcatgcatatgagtctagctcaacagagcttttaacccaaattggtacaatagaatacaactttagatcataattctcaaaagaaagagattccttagctattctatctgccactccatttccttctcggcttgtatgcacaagcataaaatcctcaaacttgctaagtagatactttatgtcttggataattggattgagacttgacaagcataactttcatgtaaccaaagacacaagttgctgagaatccacctcaaaaatgatcttcctataattgaatcgggataatgacagcacagcccatctaagagcctccacttctacttccagcacgcttcttacttttaccacagctcttgcacctaaccataacaccttccctgtatgatcgcgaagcacccaccctaagccacattttaatccttctgttggccatgccccatcaaagttgcacttaacccaagattgtggtggagcttcccatgtttctcgtctgtcccgacggtgttgtggttggtgctttccttacattctgagcctctttccttctaatccactcatctgcatcttcttgtgtccttactaatacctcattggttccaaattccctccctttaagcaccagctcgtttctgttcttccacagcctcccaagtatccaagggactaaagcctccacattcttcagatcaggatattcttgtttaagatgttgaactctatggaggtttgtatgaactgatgatctaggaccggataagttcccttcttcatagcgaacttattcaaagaatgttttgtgtatcattcttgttacattgttattaatgaaaaaatattattggtcattggactgaacacgagtgttaaatatggaccaggccccaaataagatccattgatatatgaattaaataacaagaataaatcgagtcaccaaaccacttgccttttttaacgagacttgttcaccaacttgatacaaaagtcattatcctatgcaaatcaataatcatacaaaaatatccaataacactaaaaaattaaaagaaatggataatttcacaatatgttatacgataaagaagttacttttccaagaaattcactgattttataagcccacttgcattagataaatggcaaaaaaaaacaaaaaggaaaagaaataaagcacgaagaattctagaaaatacgaaatacgcttcaatgcagtgggacccacggttcaattattgccaattttcagctccaccgtatatttaaaaaataaaacgataatgctaaaaaaatataaatcgtaacgatcgttaaatctcaacggctggatcttatgacgaccgttagaaattgtggttgtcgacgagtcagtaataaacggcgtcaaagtggttgcagccggcacacacgagtcgtgtttatcaactcaaagcacaaatacttttcctcaacctaaaaataaggcaattagccaaaaacaactttgcgtgtaaacaacgctcaatacacgtgtcattttattattagctattgcttcaccgccttagctttctcgtgacctagtcgtcctcgtcttttcttcttcttcttctataaaacaatacccaaagagctcttcttcttcacaattcagatttcaatttctcaaaatcttaaaaactttctctcaattctctctaccgtgatcaaggtaaatttctgtgttccttattctctcaaaatcttcgattttgttttcgttcgatcccaatttcgtatatgttctttggtttagattctgttaatcttagatcgaagacgattttctgggtttgatcgttagatatcatcttaattctcgattagggtttcatagatatcatccgatttgttcaaataatttgagttttgtcgaataattactcttcgatttgtgatttctatctagatctggtgttagtttctagtttgtgcgatcgaatttgtcgattaatctgagtttttctgattaacagggatcatcaacaagtttgtacaaaaaagcaggctctttaaagtatttttacaacaattaccaacaacaacaaacaacaaacaacattacaattactatttacaattacaaaaaaagttaacatggacaagaagtacagcatcggcctggccatcggcaccaactctgtgggctgggccgtgatcaccgacgagtacaaggtgcccagcaagaaattcaaggtgctgggcaacaccgaccggcacagcatcaagaagaacctgatcggcgccctgctgttcgacagcggagaaacagccgaggccacccggctgaagagaaccgccagaagaagatacaccagacggaagaaccggatctgctatctgcaagagatcttcagcaacgagatggccaaggtggacgacagcttcttccacagactggaagagtccttcctggtggaagaggataagaagcacgagcggcaccccatcttcggcaacatcgtggacgaggtggcctaccacgagaagtaccccaccatctaccacctgagaaagaaactggtggacagcaccgacaaggccgacctgcggctgatctatctggccctggcccacatgatcaagttccggggccacttcctgatcgagggcgacctgaaccccgacaacagcgacgtggacaagctgttcatccagctggtgcagacctacaaccagctgttcgaggaaaaccccatcaacgccagcggcgtggacgccaaggccatcctgtctgccagactgagcaagagcagacggctggaaaatctgatcgcccagctgcccggcgagaagaagaatggcctgttcggcaacctgattgccctgagcctgggcctgacccccaacttcaagagcaacttcgacctggccgaggatgccaaactgcagctgagcaaggacacctacgacgacgacctggacaacctgctggcccagatcggcgaccagtacgccgacctgtttctggccgccaagaacctgtccgacgccatcctgctgagcgacatcctgagagtgaacaccgagatcaccaaggcccccctgagcgcctctatgatcaagagatacgacgagcaccaccaggacctgaccctgctgaaagctctcgtgcggcagcagctgcctgagaagtacaaagagattttcttcgaccagagcaagaacggctacgccggctacatcgatggcggagccagccaggaagagttctacaagttcatcaagcccatcctggaaaagatggacggcaccgaggaactgctcgtgaagctgaacagagaggacctgctgcggaagcagcggaccttcgacaacggcagcatcccccaccagatccacctgggagagctgcacgccattctgcggcggcaggaagatttttacccattcctgaaggacaaccgggaaaagatcgagaagatcctgaccttccgcatcccctactacgtgggccctctggccaggggaaacagcagattcgcctggatgaccagaaagagcgaggaaaccatcaccccctggaacttcgaggaagtggtggacaagggcgccagcgcccagagcttcatcgagcggatgaccaacttcgataagaacctgcccaacgagaaggtgctgcccaagcacagcctgctgtacgagtacttcaccgtgtacaacgagctgaccaaagtgaaatacgtgaccgagggaatgagaaagcccgccttcctgagcggcgagcagaaaaaagccatcgtggacctgctgttcaagaccaaccggaaagtgaccgtgaagcagctgaaagaggactacttcaagaaaatcgagtgcttcgactccgtggaaatctccggcgtggaagatcggttcaacgcctccctgggcacataccacgatctgctgaaaattatcaaggacaaggacttcctggacaatgaggaaaacgaggacattctggaagatatcgtgctgaccctgacactgtttgaggacagagagatgatcgaggaacggctgaaaacctatgcccacctgttcgacgacaaagtgatgaagcagctgaagcggcggagatacaccggctggggcaggctgagccggaagctgatcaacggcatccgggacaagcagtccggcaagacaatcctggatttcctgaagtccgacggcttcgccaacagaaacttcatgcagctgatccacgacgacagcctgacctttaaagaggacatccagaaagcccaggtgtccggccagggcgatagcctgcacgagcacattgccaatctggccggcagccccgccattaagaagggcatcctgcagacagtgaaggtggtggacgagctcgtgaaagtgatgggccggcacaagcccgagaacatcgtgatcgaaatggccagagagaaccagaccacccagaagggacagaagaacagccgcgagagaatgaagcggatcgaagagggcatcaaagagctgggcagccagatcctgaaagaacaccccgtggaaaacacccagctgcagaacgagaagctgtacctgtactacctgcagaatgggcgggatatgtacgtggaccaggaactggacatcaaccggctgtccgactacgatgtggacgctatcgtgcctcagagctttctgaaggacgactccatcgataacaaagtgctgactcggagcgacaagaaccggggcaagagcgacaacgtgccctccgaagaggtcgtgaagaagatgaagaactactggcgccagctgctgaatgccaagctgattacccagaggaagttcgacaatctgaccaaggccgagagaggcggcctgagcgaactggataaggccggcttcatcaagagacagctggtggaaacccggcagatcacaaagcacgtggcacagatcctggactcccggatgaacactaagtacgacgagaacgacaaactgatccgggaagtgaaagtgatcaccctgaagtccaagctggtgtccgatttccggaaggatttccagttttacaaagtgcgcgagatcaacaactaccaccacgcccacgacgcctacctgaacgccgtcgtgggaaccgccctgatcaaaaagtaccctaagctggaaagcgagttcgtgtacggcgactacaaggtgtacgacgtgcggaagatgatcgccaagagcgagcaggaaatcggcaaggctaccgccaagtacttcttctacagcaacatcatgaactttttcaagaccgagattaccctggccaacggcgagatccggaagcggcctctgatcgagacaaacggcgaaacaggcgagatcgtgtgggataagggccgggactttgccaccgtgcggaaagtgctgtctatgccccaagtgaatatcgtgaaaaagaccgaggtgcagacaggcggcttcagcaaagagtctatcctgcccaagaggaacagcgacaagctgatcgccagaaagaaggactgggaccctaagaagtacggcggcttcgacagccccaccgtggcctattctgtgctggtggtggccaaagtggaaaagggcaagtccaagaaactgaagagtgtgaaagagctgctggggatcaccatcatggaaagaagcagcttcgagaagaatcccatcgactttctggaagccaagggctacaaagaagtgaaaaaggacctgatcatcaagctgcctaagtactccctgttcgagctggaaaacggccggaagagaatgctggcctctgccggcgaactgcagaagggaaacgaactggccctgccctccaaatatgtgaacttcctgtacctggccagccactatgagaagctgaagggctcccccgaggataatgagcagaaacagctgtttgtggaacagcacaaacactacctggacgagatcatcgagcagatcagcgagttctccaagagagtgatcctggccgacgctaatctggacaaggtgctgagcgcctacaacaagcacagagacaagcctatcagagagcaggccgagaatatcatccacctgtttaccctgaccaatctgggagcccctgccgccttcaagtactttgacaccaccatcgaccggaagaggtacaccagcaccaaagaggtgctggacgccaccctgatccaccagagcatcaccggcctgtacgagacacggatcgacctgtctcagctgggaggcgacgcctatccctatgacgtgcccgattatgccagcctgggcagcggctcccccaagaaaaaacgcaaggtggaagatcctaagaaaaagcggaaagtggaagatgctccaaagaagaagagaaaggtcgacggcattggtagtgggagcaacggcagcagcggatccaacggtccgactgacgccgcggaagaagaacttttgagcaagaattatcatcttgagaacgaagtggctcgtcttaagaaaggttctggcagtggaggttctggctccggatctggtggttcgggctcaggcgggtccggatcaggcgaagaactgctttcaaagaattaccacctggaaaatgaggtagctagactgaaaaaggggagcggaagtgggggctccgggtcgggctcagggggctccggttcgggaggctcagggtcgggggaggagttgctgagcaaaaattatcatttggagaacgaagtagcacgactaaagaaagggtccggatcgggtggttcaggatctggatccggaggatcagggtccggtgggtcgggctcaggagaggagttactctcgaaaaattatcatctcgaaaacgaagtggctcggctaaaaaagggcagtggttctggaggatctgggtcggggtcaggcgggtctggatctgggggatctggatctggtgaagagctattatctaaaaactaccacctcgaaaatgaggtggcacgcttaaaaaagggaagtggcagtggtgggtcgggatctggctctggtggctcaggctcgggaggttcaggttccggggaagagctactatccaagaattatcatcttgagaacgaggtagcgcgtttgaagaagggttccggctcaggaggatctgggtcagggtcagggggttccgggtcaggcgggtccgggtcaggcgaggaactgctctcgaagaactatcatcttgaaaatgaggtcgctcgattaaaaaagggatcgggcagtggtgggtccggctccggttccggaggatcgggatctgggggctcgggatccggggaggaactactttcaaagaattaccacctcgaaaacgaagtagctcgattaaagaaaggttcagggtcgggtggctcaggttcgggatcaggtgggtcaggctccggtggttcaggttcgggagaagaattactgagtaaaaattatcatctggaaaatgaggtagcgagactaaaaaaggggagtggttctggcggttcgggatctggctctgggggctctgggtcgggagggtctgggtctggcgaggaattgctatcgaaaaattatcatcttgagaacgaagttgctaggctcaaaaagggctcaggctcaggcgggtccgggtcagggtcgggaggttccggatccgggggatcaggctcagggtaacccgggggcgcgccatgataactagagtcctgctttaatgagatatgcgagacgcctatgatcgcatgatatttgctttcaattctgttgtgcacgttgtaaaaaacctgagcatgtgtagctcagatccttaccgccggtttcggttcattctaatgaatatatcacccgttactatcgtatttttatgaataatattctccgttcaatttactgattgtaccctactacttatatgtacaatattaaaatgaaaacaatatattgtgctgaataggtttatagcgacatctatgatagagcgccacaataacaaacaattgcgttttattattacaaatccaattttaaaaaaagcggcagaaccggtcaaacctaaaagactgattacataaatcttattcaaatttcaaaag

SEQ ID NO: 163 - DNA, 16290 bp, Artificial Sequence
  Synthetic Construct
cacggggtggtttggtttaaacgtaacatagatgacaccgcgcgcgataatttatcctagtttgcgcgctatattttgttttctatcgcgtattaaatgtataattgcgggactctaatcataaaaacccatctcataaataacgtcatgcattacatgttaattattacatgcttaacgtaattcaacagaaattatatgataatcatcgcaagaccggcaacaggattcaatcttaagaaactttattgccaaatgtttgaacgatcggggaaattcgagctcaaacttacggccatggcgtaggcggccttttccgttgtgatcttcgcggtctcctccttgtttttggactagtaccaccaccgctaccaccaccttcggttaccgtgaaggttttggtagcgtcgtcgtaggtccattcaccgtcaacaccgttgtcgttagcgtactgtttgaaaactttttccgcggtagcagcgtcaacagcttcggtggtggtttcacctttcagggttttaccgttcaggataagcttgtactcttcggtccgagatcctcctcccgtacgtcagacccaatggttatagggccccgcaacgtgtgtgagagcataaggggacacggtgacaacattgtcatgggttaatgttaatgctttatgagaaggaatttggttcaattcatttacttcagaggactgttctggaccttcattagctgcctggtctttttgctctgaggccttcattttcttattcttagcttctttagcctcaaacttaatcttgtttagttcaaaaccatgttggggcttatttaggtttttgtgctggtaaaagacaagggagaggcgggttggatgattacggttggggtgctcaacaggagtggtagcgtgcagctctcgccgggcacactcaatcaaaaccgagccgtgagcaggtgcgatggccaccccaccaatatttgcatccaaaaagatgtgctcactgtctgaccaatactcatcaatgtggggcaatttctcctcagcaggtgacagggggtcatcagataggggttcgtctgatggaggctcatctgcttcagaatgctgctcatcttcttccattggagaagaggcaaggtcttgaggagaggtgaggaaggagggctggtggtttggctgatgaggcgttagcggctcagtcacaccagtggaaggctcagaattaatgaggggctccatcacaggagcagacagggtggggagaggagccacttcgccaagctgtgaaatgccagggccatcagcagctgcagcattggcaccactgagtcttcccgaaggcatcgtacagtggggagtgctgcttctttctgaaaacccgcatgaggctgttgcgtcattcttcagtggagctggtgtggctgaagcagtcttcggggaccaggagaagcctggagatgcctctttcactgggtgaggagcggatggcatcagcgaataagttttagtgttgtctgaactttttaagataaaatggggttcggtttcactttttacttcaggttgcacggtctcagtgttactccctaaggttggcagtgacgaaggcttactgttgtttgttgttgttgagttattcttccgcttgattcggggaataggtttcttttccactgcccttatcttatgtgcaagaacctctgtcatcatcgcagccctcttctttccagaacggggaacaggctgagtgaaacacgttctttttttgcggcggggtgccaggacctcgatggccccagatttgatcttggcttccattccttccttggagccaaactcatctgtgtctgaaagcttataaagaggtagcacatggagctgctcatcttgaggaataacacccaaagagcggttatcttctcgagttaaggtacaaaccacagtgcttccattattcatgttgtgaatgtccctgtggggatgagcacagaagtccaggcaagcagtgaccccagagaagggtcgaccttccttgctgccaagccgacattctcgggcaacattttcatattccacctgattttggtaagctactggagcatactgcttataaattggagctaatcgtgtagccaaactctgtaagttatcttcaaggtttttttcatgtaagggagagcttggatcaattctaaatcttctggggcttgggcttctaccaaacttacagccattaaagtacatactccatgaacagccaaaagagaatgaagctccacaagtctctggatcaattccttgacatgtacaggtacgattttcattgagggtgcatcttctgtcggtagggtgcccattgtatgactttagattctctgtgagctctgtgtatagccggtcggccattggaagagggatgccatcccacaccatgatgagcaccaccatcacagcagttggacagtggtggcctgtacgctgccggaccaaacaaagaactttttcttcatcactgcttcttcttaaaacccacttagcaattggacacccatgagagcttttcccttctttaccggtgtacactactatttctatccttattgcgtttcctttttgaccatacctattctccatgatttccctgacagcagcaacacttggtcctgccccaaggtgtgtataatatgggcctttgtctttttgtataactcgatcaagacagctgcaggtgggcagcccggatccgccaccgcccactttccgctttttcttaggagcttccaccttgcgttttttcttgggagcgccgctgcccaggctggcataatcgggcacgtcatagggatacgtacgaccggtccgacctccacctttgtagagctcatccatgccatgtgtaatcccagcagcagttacaaactcaagaaggaccatgtggtcacgcttttcgttgggatctttcgaaaggacagattgtgtcgacaggtaatggttgtctggtaaaaggacagggccatcgccaattggagtattttgttgataatggtctgctagttgaacggaaccatcttcaacgttgtggcgaattttgaagttagctttgattccattcttttgtttgtctgccgtgatgtatacattgtgtgagttaaagttgtactcgagtttgtgtccaagaatgtttccatcttctttaaaatcaataccctttaactcgatacgattaacaagggtatcaccttcaaacttgacttcagcacgcgtcttgtaggtcccgtcatctttgaaagatatagtgcgttcctgtacataaccttcgggcatggcactcttgaaaaagtcatgccgtttcatgtgatccggataacgggaaaagcattgaacaccataggtcagagtagtgacaagtgttggccacggaacaggtagttttccagtagtgcaaataaatttaagggtgagttttccgtttgtagcatcaccttcaccctctccacggacagaaaatttgtgcccattaacatcaccatctaattcaacaagaattgggacaactccagtgaaaagttcttctcctttgctaccgcttccacctccacctggatccaagcttccgccgcctcctgaaccaccaccgccactacctcctcccccagaacctccgcctccaccagcgtaatctggaacatcgtatgggtagctgctcacggtcaccagggtgccctggccccagtagtcgaacaggccggtcacgcagtagtacagggcggtgtcgtcgctgcgcaccttgctcatctgcaggtacacggtgttcttgccgttgtccttgctgatgatgaagcggtccttcagggcgctgttgtagtcggtgatgccgtcgccccagatcacgccgatccactccaggccgcggccgggggcctggcgcacccagttcacgccgtagtcggtcaggctgaagccgctcacggcgcagctcagcttcaggctgccgccgggctgcaccaggccgccgccgctctccagcagcttcacctcgctgccgccgccgctgctgccgccgccgccgctgccgccgccgccgctgccgccgccgccgcgcttcagctccaccttggtgccctggccgaacacccagtggttgctgtaccacagggcgcagaagtaggtggcgaagtcctcgggctgcaggctgctgatggtcagggtggccttgtcgccgatcaggctgccgctgaagcggctgggcacgccgggggcgcggttgttggtgccgccgatcaggcccttgaacagcttgccgggcttctcctgcacccagctggcgtagttgctggtggtcacggcgccggtgctgctgcggcaggtgatggtcacgcggtcgcccacgctggcgctcaggctgctggggctctgggtcatcacgatgtcggggcccataaaccctaggtgttaatcagaaaaactcagattaatcgacaaattcgatcgcacaaactagaaactaacaccagatctagatagaaatcacaaatcgaagagtaattattcgacaaaactcaaattatttgaacaaatcggatgatatctatgaaaccctaatcgagaattaagatgatatctaacgatcaaacccagaaaatcgtcttcgatctaagattaacagaatctaaaccaaagaacatatacgaaattgggatcgaacgaaaacaaaatcgaagattttgagagaataaggaacacagaaatttaccttgatcacggtagagagaattgagagaaagtttttaagattttgagaaattgaaatctgaattgtgaagaagaagagctctttgggtattgttttatagaagaagaagaagaaaagacgaggacgactaggtcacgagaaagctaaggcggtgaagcaatagctaataataaaatgacacgtgtattgagcgttgtttacacgcaaagttgtttttggctaattgccttatttttaggttgaggaaaagtatttgtgctttgagttgataaacacgactcgtgtgtgccggctgcaaccactttgacgccgtttattactgactcgtcgacaaccacaatttctaacggtcgtcataagatccagccgttgagatttaacgatcgttacgatttatatttttttagcattatcgttttattttttaaatatacggtggagctgaaaattggcaataattgaaccgtgggtcccactgcattgaagcgtatttcgtattttctagaattcttcgtgctttatttcttttcctttttgtttttttttgccatttatctaatgcaagtgggcttataaaatcagtgaatttcttggaaaagtaacttctttatcgtataacatattgtgaaattatccatttcttttaattttttagtgttattggatatttttgtatgattattgatttgcataggataatgacttttgtatcaagttggtgaacaagtctcgttaaaaaaggcaagtggtttggtgactcgatttattcttgttatttaattcatatatcaatggatcttatttggggcctggtccatatttaacactcgtgttcagtccaatgaccaataatattttttcattaataacaatgtaacaagaatgatacacaaaacattctttgaataagttcgctatgaagaagggaacttatccggtcctagatcatcagttcatacaaacctccatagagttcaacatcttaaacaagaatatcctgatctgaagaatgtggaggctttagtcccttggatacttgggaggctgtggaagaacagaaacgagctggtgcttaaagggagggaatttggaaccaatgaggtattagtaaggacacaagaagatgcagatgagtggattagaaggaaagaggctcagaatgtaaggaaagcaccaaccacaacaccgtcgggacagacgagaaacatgggaagctccaccacaatcttgggttaagtgcaactttgatggggcatggccaacagaaggattaaaatgtggcttagggtgggtgcttcgcgatcatacagggaaggtgttatggttaggtgcaagagctgtggtaaaagtaagaagcgtgctggaagtagaagtggaggctcttagatgggctgtgctgtcattatcccgattcaattataggaagatcatttttgaggtggattctcagcaacttgtgtctttggttacatgaaagttatgcttgtcaagtctcaatccaattatccaagacataaagtatctacttagcaagtttgaggattttatgcttgtgcatacaagccgagaaggaaatggagtggcagatagaatagctaaggaatctctttcttttgagaattatgatctaaagttgtattctattgtaccaatttgggttaaaagctctgttgagctagactcatatgcatcctaggaaacaagttgtaatgagttgctggcctctcttgggattgttcatcaaagtagctgtccctacacaccacaacagaatggtgttgtggagagaaagcacagacacatccttgagatggcaagggcacttaagtttcagagtggtgtacctaccaggttttggggagactgtgtcaagactgttgtatacctgatcaatagactccctactccaatcttacaaggcaaatgtccatatgaactactctatcagaaacatgccaagcttgatcacttgagagtgtttgggtgtcttgcttttgcagcaacactgcccaaaggtgacaaacttgcacctagagccaagcgaaccatcttcattggttattctgagactcaaaagggttacaggttgtatgacttggataataaggtgatcatagtgagcagggatgtagttttcagagagtttcagttccctttcaaagagtccatctcccatgaacctgatatgttcactcgagcaggttcacttagctctgaagatacagctttgcagctagtgtataatgatatttttccttccagctttcatactgatgatgatgatactccagttcttattcctgacattgtagaggccaatgaggatatcactttggggactcattctacccaaaatcatatcacttcagctgatgctgcaccttcaggccacctgcatgctcctgcagagtcagttgagtcagctgagcctgacctagcaaatgctgaatttgagcaccatactgctgtagctgatccctctctagttccagcaaacctgcacactagacctaaacgcaatgcaggtcctcccatctggctcaaggactttgtgacactgaacaaaggctctagggatgttccataccctatagccaactatgtttcctatgatcacttgcctgttcactatcaagcttatttgagtgctttctccacttatactgaacctaaatccttcaaagaagcagctcaagatgagaaatggatggaggccatgtcccttgagatacaggctcttgaggataataacacctgggagattgtccctttaccccctggtaaacagcctatagggtccaaatgggtgtacaaaattaaatacaaagctaatggtgaagttgacaggtttaaggcaaggctagtggccaagggatacactcagcaagaaggccttgactaccatgaaactttttctccagtggccaaaatggtcactgtaaaagctgtcatatctgttgctgcttccaagggctggttccttttccagatggatgtcaacaatgcttttctacaaggtgacctcatggaagaagtttatatgtctctgcctcagggttttcacagccaaggggagaccaaagtgtgcaggctgttgaatccctctatggtttaaagcaagcatcaaggcagtggaacatcaagcttaccactgtccttatgcaggctggttttatgcaaagtgcttatgatcactccttgtttaccaaaagagaggggactgaccttgtcataatcctgatttatgtggatgatctgttaataacaggcagcagcaatgttttgatttcagaagcaaaggcaaccctgcatcagcatttcaagatgaaagatttgggagaactaaaatacttcttaggcattgaggtgctgagatcagaaaagggaatcctactgaaccagaggaagtatgcactggaactgatatcaggtgttggtctgggaggctgcagaccagtgtcaaccccaatggaacagaaccaaaggctgactactgtagaatatgacaagcacttaggaaagactgatgatgcagagttagaggatgtgggttcctatcagagactggtgggaaagcttctctacttgacaatcacaaggccagatatcagctttgcagtgcaggtgctgagtcaattcatgcagcaacccaaacagtcacacctggaagcagcattgagggttgtgaagtacataaaaggttctccaggtgttaggaagcggccgcatgcatatgagtctagctcaacagagcttttaacccaaattggtacaatagaatacaactttagatcataattctcaaaagaaagagattccttagctattctatctgccactccatttccttctcggcttgtatgcacaagcataaaatcctcaaacttgctaagtagatactttatgtcttggataattggattgagacttgacaagcataactttcatgtaaccaaagacacaagttgctgagaatccacctcaaaaatgatcttcctataattgaatcgggataatgacagcacagcccatctaagagcctccacttctacttccagcacgcttcttacttttaccacagctcttgcacctaaccataacaccttccctgtatgatcgcgaagcacccaccctaagccacattttaatccttctgttggccatgccccatcaaagttgcacttaacccaagattgtggtggagcttcccatgtttctcgtctgtcccgacggtgttgtggttggtgctttccttacattctgagcctctttccttctaatccactcatctgcatcttcttgtgtccttactaatacctcattggttccaaattccctccctttaagcaccagctcgtttctgttcttccacagcctcccaagtatccaagggactaaagcctccacattcttcagatcaggatattcttgtttaagatgttgaactctatggaggtttgtatgaactgatgatctaggaccggataagttcccttcttcatagcgaacttattcaaagaatgttttgtgtatcattcttgttacattgttattaatgaaaaaatattattggtcattggactgaacacgagtgttaaatatggaccaggccccaaataagatccattgatatatgaattaaataacaagaataaatcgagtcaccaaaccacttgccttttttaacgagacttgttcaccaacttgatacaaaagtcattatcctatgcaaatcaataatcatacaaaaatatccaataacactaaaaaattaaaagaaatggataatttcacaatatgttatacgataaagaagttacttttccaagaaattcactgattttataagcccacttgcattagataaatggcaaaaaaaaacaaaaaggaaaagaaataaagcacgaagaattctagaaaatacgaaatacgcttcaatgcagtgggacccacggttcaattattgccaattttcagctccaccgtatatttaaaaaataaaacgataatgctaaaaaaatataaatcgtaacgatcgttaaatctcaacggctggatcttatgacgaccgttagaaattgtggttgtcgacgagtcagtaataaacggcgtcaaagtggttgcagccggcacacacgagtcgtgtttatcaactcaaagcacaaatacttttcctcaacctaaaaataaggcaattagccaaaaacaactttgcgtgtaaacaacgctcaatacacgtgtcattttattattagctattgcttcaccgccttagctttctcgtgacctagtcgtcctcgtcttttcttcttcttcttctataaaacaatacccaaagagctcttcttcttcacaattcagatttcaatttctcaaaatcttaaaaactttctctcaattctctctaccgtgatcaaggtaaatttctgtgttccttattctctcaaaatcttcgattttgttttcgttcgatcccaatttcgtatatgttctttggtttagattctgttaatcttagatcgaagacgattttctgggtttgatcgttagatatcatcttaattctcgattagggtttcatagatatcatccgatttgttcaaataatttgagttttgtcgaataattactcttcgatttgtgatttctatctagatctggtgttagtttctagtttgtgcgatcgaatttgtcgattaatctgagtttttctgattaacagggatcatcaacaagtttgtacaaaaaagcaggctctttaaagtatttttacaacaattaccaacaacaacaaacaacaaacaacattacaattactatttacaattacaaaaaaagttaacatggacaagaagtacagcatcggcctggccatcggcaccaactctgtgggctgggccgtgatcaccgacgagtacaaggtgcccagcaagaaattcaaggtgctgggcaacaccgaccggcacagcatcaagaagaacctgatcggcgccctgctgttcgacagcggagaaacagccgaggccacccggctgaagagaaccgccagaagaagatacaccagacggaagaaccggatctgctatctgcaagagatcttcagcaacgagatggccaaggtggacgacagcttcttccacagactggaagagtccttcctggtggaagaggataagaagcacgagcggcaccccatcttcggcaacatcgtggacgaggtggcctaccacgagaagtaccccaccatctaccacctgagaaagaaactggtggacagcaccgacaaggccgacctgcggctgatctatctggccctggcccacatgatcaagttccggggccacttcctgatcgagggcgacctgaaccccgacaacagcgacgtggacaagctgttcatccagctggtgcagacctacaaccagctgttcgaggaaaaccccatcaacgccagcggcgtggacgccaaggccatcctgtctgccagactgagcaagagcagacggctggaaaatctgatcgcccagctgcccggcgagaagaagaatggcctgttcggcaacctgattgccctgagcctgggcctgacccccaacttcaagagcaacttcgacctggccgaggatgccaaactgcagctgagcaaggacacctacgacgacgacctggacaacctgctggcccagatcggcgaccagtacgccgacctgtttctggccgccaagaacctgtccgacgccatcctgctgagcgacatcctgagagtgaacaccgagatcaccaaggcccccctgagcgcctctatgatcaagagatacgacgagcaccaccaggacctgaccctgctgaaagctctcgtgcggcagcagctgcctgagaagtacaaagagattttcttcgaccagagcaagaacggctacgccggctacatcgatggcggagccagccaggaagagttctacaagttcatcaagcccatcctggaaaagatggacggcaccgaggaactgctcgtgaagctgaacagagaggacctgctgcggaagcagcggaccttcgacaacggcagcatcccccaccagatccacctgggagagctgcacgccattctgcggcggcaggaagatttttacccattcctgaaggacaaccgggaaaagatcgagaagatcctgaccttccgcatcccctactacgtgggccctctggccaggggaaacagcagattcgcctggatgaccagaaagagcgaggaaaccatcaccccctggaacttcgaggaagtggtggacaagggcgccagcgcccagagcttcatcgagcggatgaccaacttcgataagaacctgcccaacgagaaggtgctgcccaagcacagcctgctgtacgagtacttcaccgtgtacaacgagctgaccaaagtgaaatacgtgaccgagggaatgagaaagcccgccttcctgagcggcgagcagaaaaaagccatcgtggacctgctgttcaagaccaaccggaaagtgaccgtgaagcagctgaaagaggactacttcaagaaaatcgagtgcttcgactccgtggaaatctccggcgtggaagatcggttcaacgcctccctgggcacataccacgatctgctgaaaattatcaaggacaaggacttcctggacaatgaggaaaacgaggacattctggaagatatcgtgctgaccctgacactgtttgaggacagagagatgatcgaggaacggctgaaaacctatgcccacctgttcgacgacaaagtgatgaagcagctgaagcggcggagatacaccggctggggcaggctgagccggaagctgatcaacggcatccgggacaagcagtccggcaagacaatcctggatttcctgaagtccgacggcttcgccaacagaaacttcatgcagctgatccacgacgacagcctgacctttaaagaggacatccagaaagcccaggtgtccggccagggcgatagcctgcacgagcacattgccaatctggccggcagccccgccattaagaagggcatcctgcagacagtgaaggtggtggacgagctcgtgaaagtgatgggccggcacaagcccgagaacatcgtgatcgaaatggccagagagaaccagaccacccagaagggacagaagaacagccgcgagagaatgaagcggatcgaagagggcatcaaagagctgggcagccagatcctgaaagaacaccccgtggaaaacacccagctgcagaacgagaagctgtacctgtactacctgcagaatgggcgggatatgtacgtggaccaggaactggacatcaaccggctgtccgactacgatgtggacgctatcgtgcctcagagctttctgaaggacgactccatcgataacaaagtgctgactcggagcgacaagaaccggggcaagagcgacaacgtgccctccgaagaggtcgtgaagaagatgaagaactactggcgccagctgctgaatgccaagctgattacccagaggaagttcgacaatctgaccaaggccgagagaggcggcctgagcgaactggataaggccggcttcatcaagagacagctggtggaaacccggcagatcacaaagcacgtggcacagatcctggactcccggatgaacactaagtacgacgagaacgacaaactgatccgggaagtgaaagtgatcaccctgaagtccaagctggtgtccgatttccggaaggatttccagttttacaaagtgcgcgagatcaacaactaccaccacgcccacgacgcctacctgaacgccgtcgtgggaaccgccctgatcaaaaagtaccctaagctggaaagcgagttcgtgtacggcgactacaaggtgtacgacgtgcggaagatgatcgccaagagcgagcaggaaatcggcaaggctaccgccaagtacttcttctacagcaacatcatgaactttttcaagaccgagattaccctggccaacggcgagatccggaagcggcctctgatcgagacaaacggcgaaacaggcgagatcgtgtgggataagggccgggactttgccaccgtgcggaaagtgctgtctatgccccaagtgaatatcgtgaaaaagaccgaggtgcagacaggcggcttcagcaaagagtctatcctgcccaagaggaacagcgacaagctgatcgccagaaagaaggactgggaccctaagaagtacggcggcttcgacagccccaccgtggcctattctgtgctggtggtggccaaagtggaaaagggcaagtccaagaaactgaagagtgtgaaagagctgctggggatcaccatcatggaaagaagcagcttcgagaagaatcccatcgactttctggaagccaagggctacaaagaagtgaaaaaggacctgatcatcaagctgcctaagtactccctgttcgagctggaaaacggccggaagagaatgctggcctctgccggcgaactgcagaagggaaacgaactggccctgccctccaaatatgtgaacttcctgtacctggccagccactatgagaagctgaagggctcccccgaggataatgagcagaaacagctgtttgtggaacagcacaaacactacctggacgagatcatcgagcagatcagcgagttctccaagagagtgatcctggccgacgctaatctggacaaggtgctgagcgcctacaacaagcacagagacaagcctatcagagagcaggccgagaatatcatccacctgtttaccctgaccaatctgggagcccctgccgccttcaagtactttgacaccaccatcgaccggaagaggtacaccagcaccaaagaggtgctggacgccaccctgatccaccagagcatcaccggcctgtacgagacacggatcgacctgtctcagctgggaggcgacgcctatccctatgacgtgcccgattatgccagcctgggcagcggctcccccaagaaaaaacgcaaggtggaagatcctaagaaaaagcggaaagtggaagatgctccaaagaagaagagaaaggtcgacggcattggtagtgggagcaacggcagcagcggatccaacggtccgactgacgccgcggaagaagaacttttgagcaagaattatcatcttgagaacgaagtggctcgtcttaagaaaggttctggcagtggaggttctggctccggaggttccggcggggaagaactgctttcaaagaattaccacctggaaaatgaggtagctagactgaaaaaggggagcggaagtgggggctccgggtcgggcggctctgggggagaggagttgctgagcaaaaattatcatttggagaacgaagtagcacgactaaagaaagggtccggatcgggtggttcaggatctggaggttcgggtggggaggagttactctcgaaaaattatcatctcgaaaacgaagtggctcggctaaaaaagggcagtggttctggaggatctgggtcggggggatccgggggtgaagagctattatctaaaaactaccacctcgaaaatgaggtggcacgcttaaaaaagggaagtggcagtggtgggtcgggatctggcgggtcgggtggagaagagctactatccaagaattatcatcttgagaacgaggtagcgcgtttgaagaagggttccggctcaggaggatctgggtcagggggctcaggaggggaggaactgctctcgaagaactatcatcttgaaaatgaggtcgctcgattaaaaaagggatcgggcagtggtgggtccggctccggtggttcggggggcgaggaactactttcaaagaattaccacctcgaaaacgaagtagctcgattaaagaaaggttcagggtcgggtggctcaggttcgggaggatccggcggtgaagaattactgagtaaaaattatcatctggaaaatgaggtagcgagactaaaaaaggggagtggttctggcggttcgggatctggcgggtcgggaggggaggaattgctatcgaaaaattatcatcttgagaacgaagttgctaggctcaaaaagggctcaggctcaggcgggtccgggtcagggggctcaggtggctaacccgggggcgcgccatgataactagagtcctgctttaatgagatatgcgagacgcctatgatcgcatgatatttgctttcaattctgttgtgcacgttgtaaaaaacctgagcatgtgtagctcagatccttaccgccggtttcggttcattctaatgaatatatcacccgttactatcgtatttttatgaataatattctccgttcaatttactgattgtaccctactacttatatgtacaatattaaaatgaaaacaatatattgtgctgaataggtttatagcgacatctatgatagagcgccacaataacaaacaattgcgttttattattacaaatccaattttaaaaaaagcggcagaaccggtcaaacctaaaagactgattacataaatcttattcaaatttcaaaag

SEQ ID NO: 164 - protein, 9 aa, Artificial Sequence
  Synthetic Construct
SSGPPPGTG

SEQ ID NO: 165 - protein, 12 aa, Artificial Sequence
  Synthetic Construct
AEAAAKEAAAKA

SEQ ID NO: 166 - protein, 16 aa, Artificial Sequence
  Synthetic Construct
SGSETPGTSESATPES

SEQ ID NO: 167 - DNA, 20 bp, Artificial Sequence
  Synthetic Construct
ttgggtttagtgtttacttg

SEQ ID NO: 168 - DNA, 22 bp, Artificial Sequence
  Synthetic Construct
gaatgttgaatgggataaggta

SEQ ID NO: 169 - DNA, 23 bp, Artificial Sequence
  Synthetic Construct
tgcaatttgtctgcttgctaatg

SEQ ID NO: 170 - DNA, 21 bp, Artificial Sequence
  Synthetic Construct
tcatttataatggacgatgcc

SEQ ID NO: 171 - DNA, 20 bp, Artificial Sequence
  Synthetic Construct
attctcgacggaaagatgta

SEQ ID NO: 172 - DNA, 20 bp, Artificial Sequence
  Synthetic Construct
acggaaagatgtatgggctt

SEQ ID NO: 173 - DNA, 20 bp, Artificial Sequence
  Synthetic Construct
ttcatacgagcgccgctcta

SEQ ID NO: 174 - DNA, 20 bp, Artificial Sequence
  Synthetic Construct
ccattggtccaagtgctatt

SEQ ID NO: 175 - DNA, 20 bp, Artificial Sequence
  Synthetic Construct
gcggcgcaagatctgatatt

SEQ ID NO: 176 - DNA, 20 bp, Artificial Sequence
  Synthetic Construct
aaaactaggccatccatgga

SEQ ID NO: 177 - DNA, 22 bp, Artificial Sequence
  Synthetic Construct
agtgtttcaatcaaggcgtttc

SEQ ID NO: 178 - DNA, 22 bp, Artificial Sequence
  Synthetic Construct
cacccaatggaacaaagtgaac

SEQ ID NO: 179 - DNA, 24 bp, Artificial Sequence
  Synthetic Construct
gtatgagttgcttctccagcaaag

SEQ ID NO: 180 - DNA, 21 bp, Artificial Sequence
  Synthetic Construct
gaggatggctgcaacaagtgt

SEQ ID NO: 181 - DNA, 25 bp, Artificial Sequence
  Synthetic Construct
caggcttgcttttggaaagggtacg

SEQ ID NO: 182 - DNA, 27 bp, Artificial Sequence
  Synthetic Construct
gtgctctctcactcttaaccataagct

SEQ ID NO: 183 - DNA, 24 bp, Artificial Sequence
  Synthetic Construct
gtatgagttgcttctccagcaaag

SEQ ID NO: 184 - DNA, 21 bp, Artificial Sequence
  Synthetic Construct
gaggatggctgcaacaagtgt

SEQ ID NO: 185 - DNA, 22 bp, Artificial Sequence
  Synthetic Construct
agtgtttcaatcaaggcgtttc

SEQ ID NO: 186 - DNA, 22 bp, Artificial Sequence
  Synthetic Construct
cacccaatggaacaaagtgaac

SEQ ID NO: 187 - DNA, 24 bp, Artificial Sequence
  Synthetic Construct
gtatgagttgcttctccagcaaag

SEQ ID NO: 188 - DNA, 21 bp, Artificial Sequence
  Synthetic Construct
gaggatggctgcaacaagtgt

SEQ ID NO: 189 - protein, 3 aa, Artificial Sequence
  Synthetic Construct
  VARIANT 2: Xaa = Any Amino Acid
HXD

SEQ ID NO: 190 - protein, 3 aa, Artificial Sequence
  Synthetic Construct
  VARIANT 2: Xaa = Any Amino Acid
HXR

SEQ ID NO: 191 - protein, 2002 aa, Homo sapiens
MEQDRTNHVEGNRLSPFLIPSPPICQTEPLATKLQNGSPLPERAHPEVNGDTKWHSFKSYYGIPCMKGSQNSRVSPDFTQESRGYSKCLQNGGIKRTVSEPSLSGLLQIKKLKQDQKANGERRNFGVSQERNPGESSQPNVSDLSDKKESVSSVAQENAVKDFTSFSTHNCSGPENPELQILNEQEGKSANYHDKNIVLLKNKAVLMPNGATVSASSVEHTHGELLEKTLSQYYPDCVSIAVQKTTSHINAINSQATNELSCEITHPSHTSGQINSAQTSNSELPPKPAAVVSEACDADDADNASKLAAMLNTCSFQKPEQLQQQKSVFEICPSPAENNIQGTTKLASGEEFCSGSSSNLQAPGGSSERYLKQNEMNGAYFKQSSVFTKDSFSATTTPPPPSQLLLSPPPPLPQVPQLPSEGKSTLNGGVLEEHHHYPNQSNTTLLREVKIEGKPEAPPSQSPNPSTHVCSPSPMLSERPQNNCVNRNDIQTAGTMTVPLCSEKTRPMSEHLKHNPPIFGSSGELQDNCQQLMRNKEQEILKGRDKEQTRDLVPPTQHYLKPGWIELKAPRFHQAESHLKRNEASLPSILQYQPNLSNQMTSKQYTGNSNMPGGLPRQAYTQKTTQLEHKSQMYQVEMNQGQSQGTVDQHLQFQKPSHQVHFSKTDHLPKAHVQSLCGTRFHFQQRADSQTEKLMSPVLKQHLNQQASETEPFSNSHLLQHKPHKQAAQTQPSQSSHLPQNQQQQQKLQIKNKEEILQTFPHPQSNNDQQREGSFFGQTKVEECFHGENQYSKSSEFETHNVQMGLEEVQNINRRNSPYSQTMKSSACKIQVSCSNNTHLVSENKEQTTHPELFAGNKTQNLHHMQYFPNNVIPKQDLLHRCFQEQEQKSQQASVLQGYKNRNQDMSGQQAAQLAQQRYLIHNHANVFPVPDQGGSHTQTPPQKDTQKHAALRWHLLQKQEQQQTQQPQTESCHSQMHRPIKVEPGCKPHACMHTAPPENKTWKKVTKQENPPASCDNVQQKSIIETMEQHLKQFHAKSLFDHKALTLKSQKQVKVEMSGPVTVLTRQTTAAELDSHTPALEQQTTSSEKTPTKRTAASVLNNFIESPSKLLDTPIKNLLDTPVKTQYDFPSCRCVEQIIEKDEGPFYTHLGAGPNVAAIREIMEERFGQKGKAIRIERVIYTGKEGKSSQGCPIAKWVVRRSSSEEKLLCLVRERAGHTCEAAVIVILILVWEGIPLSLADKLYSELTETLRKYGTLTNRRCALNEERTCACQGLDPETCGASFSFGCSWSMYYNGCKFARSKIPRKFKLLGDDPKEEEKLESHLQNLSTLMAPTYKKLAPDAYNNQIEYEHRAPECRLGLKEGRPFSGVTACLDFCAHAHRDLHNMQNGSTLVCTLTREDNREFGGKPEDEQLHVLPLYKVSDVDEFGSVEAQEEKKRSGAIQVLSSFRRKVRMLAEPVKTCRQRKLEAKKAAAEKLSSLENSSNKNEKEKSAPSRTKQTENASQAKQLAELLRLSGPVMQQSQQPQPLQKQPPQPQQQQRPQQQQPHHPQTESVNSYSASGSTNPYMRRPNPVSPYPNSSHTSDIYGSTSPMNFYSTSSQAAGSYLNSSNPMNPYPGLLNQNTQYPSYQCNGNLSVDNCSPYLGSYSPQSQPMDLYRYPSQDPLSKLSLPPIHTLYQPRFGNSQSFTSKYLGYGNQNMQGDGFSSCTIRPNVHHVGKLPPYPTHEMDGHFMGATSRLPPNLSNPNMDYKNGEHHSPSHIIHNYSAAPGMFNSSLHALHLQNKENDMLSHTANGLSKMLPALNHDRTACVQGGLHKLSDANGQEKQPLALVQGVASGAEDNDEVWSDSEQSFLDPDIGGVAVAPTHGSILIECAKRELHATTPLKNPNRNHPTRISLVFYQHKSMNEPKHGLALWEAKMAEKAREKEEECEKYGPDYVPQKSHGKKVKREPAEPHETSEPTYLRFIKSLAERTMSVTTDSTVTTSPYAFTRVTGPYNRYI

SEQ ID NO: 192 - protein, 873 aa, Artificial Sequence
  Synthetic Construct
FPSCRCVEQIIEKDEGPFYTHLGAGPNVAAIREIMEERFGQKGKAIRIERVIYTGKEGKSSQGCPIAKWVVRRSSSEEKLLCLVRERAGHTCEAAVIVILILVWEGIPLSLADKLYSELTETLRKYGTLTNRRCALNEERTCACQGLDPETCGASFSFGCSWSMYYNGCKFARSKIPRKFKLLGDDPKEEEKLESHLQNLSTLMAPTYKKLAPDAYNNQIEYEHRAPECRLGLKEGRPFSGVTACLDFCAHAHRDLHNMQNGSTLVCTLTREDNREFGGKPEDEQLHVLPLYKVSDVDEFGSVEAQEEKKRSGAIQVLSSFRRKVRMLAEPVKTCRQRKLEAKKAAAEKLSSLENSSNKNEKEKSAPSRTKQTENASQAKQLAELLRLSGPVMQQSQQPQPLQKQPPQPQQQQRPQQQQPHHPQTESVNSYSASGSTNPYMRRPNPVSPYPNSSHTSDIYGSTSPMNFYSTSSQAAGSYLNSSNPMNPYPGLLNQNTQYPSYQCNGNLSVDNCSPYLGSYSPQSQPMDLYRYPSQDPLSKLSLPPIHTLYQPRFGNSQSFTSKYLGYGNQNMQGDGFSSCTIRPNVHHVGKLPPYPTHEMDGHFMGATSRLPPNLSNPNMDYKNGEHHSPSHIIHNYSAAPGMFNSSLHALHLQNKENDMLSHTANGLSKMLPALNHDRTACVQGGLHKLSDANGQEKQPLALVQGVASGAEDNDEVWSDSEQSFLDPDIGGVAVAPTHGSILIECAKRELHATTPLKNPNRNHPTRISLVFYQHKSMNEPKHGLALWEAKMAEKAREKEEECEKYGPDYVPQKSHGKKVKREPAEPHETSEPTYLRFIKSLAERTMSVTTDSTVTTSPYAFTRVTGPYNRYI

SEQ ID NO: 193 - protein, 1660 aa, Homo sapiens
MDSGPVYHGDSRQLSASGVPVNGAREPAGPSLLGTGGPWRVDQKPDWEAAPGPAHTARLEDAHDLVAFSAVAEAVSSYGALSTRLYETFNREMSREAGNNSRGPRPGPEGCSAGSEDLDTLQTALALARHGMKPPNCNCDGPECPDYLEWLEGKIKSVVMEGGEERPRLPGPLPPGEAGLPAPSTRPLLSSEVPQISPQEGLPLSQSALSIAKEKNISLQTAIAIEALTQLSSALPQPSHSTPQASCPLPEALSPPAPFRSPQSYLRAPSWPVVPPEEHSSFAPDSSAFPPATPRTEFPEAWGTDTPPATPRSSWPMPRPSPDPMAELEQLLGSASDYIQSVFKRPEALPTKPKVKVEAPSSSPAPAPSPVLQREAPTPSSEPDTHQKAQTALQQHLHHKRSLFLEQVHDTSFPAPSEPSAPGWWPPPSSPVPRLPDRPPKEKKKKLPTPAGGPVGTEKAAPGIKPSVRKPIQIKKSRPREAQPLFPPVRQIVLEGLRSPASQEVQAHPPAPLPASQGSAVPLPPEPSLALFAPSPSRDSLLPPTQEMRSPSPMTALQPGSTGPLPPADDKLEELIRQFEAEFGDSFGLPGPPSVPIQDPENQQTCLPAPESPFATRSPKQIKIESSGAVTVLSTTCFHSEEGGQEATPTKAENPLTPTLSGFLESPLKYLDTPTKSLLDTPAKRAQAEFPTCDCVEQIVEKDEGPYYTHLGSGPTVASIRELMEERYGEKGKAIRIEKVIYTGKEGKSSRGCPIAKWVIRRHTLEEKLLCLVRHRAGHHCQNAVIVILILAWEGIPRSLGDTLYQELTDTLRKYGNPTSRRCGLNDDRTCACQGKDPNTCGASFSFGCSWSMYFNGCKYARSKTPRKFRLAGDNPKEEEVLRKSFQDLATEVAPLYKRLAPQAYQNQVTNEEIAIDCRLGLKEGRPFAGVTACMDFCAHAHKDQHNLYNGCTVVCTLTKEDNRCVGKIPEDEQLHVLPLYKMANTDEFGSEENQNAKVGSGAIQVLTAFPREVRRLPEPAKSCRQRQLEARKAAAEKKKIQKEKLSTPEKIKQEALELAGITSDPGLSLKGGLSQQGLKPSLKVEPQNHFSSFKYSGNAVVESYSVLGNCRPSDPYSMNSVYSYHSYYAQPSLTSVNGFHSKYALPSFSYYGFPSSNPVFPSQFLGPGAWGHSGSSGSFEKKPDLHALHNSLSPAYGGAEFAELPSQAVPTDAHHPTPHHQQPAYPGPKEYLLPKAPLLHSVSRDPSPFAQSSNCYNRSIKQEPVDPLTQAEPVPRDAGKMGKTPLSEVSQNGGPSHLWGQYSGGPSMSPKRTNGVGGSWGVFSSGESPAIVPDKLSSFGASCLAPSHFTDGQWGLFPGEGQQAASHSGGRLRGKPWSPCKFGNSTSALAGPSLTEKPWALGAGDFNSALKGSPGFQDKLWNPMKGEEGRIPAAGASQLDRAWQSFGLPLGSSEKLFGALKSEEKLWDPFSLEEGPAEEPPSKGAVKEEKGGGGAEEEEEELWSDSEHNFLDENIGGVAVAPAHGSILIECARRELHATTPLKKPNRCHPTRISLVFYQHKNLNQPNHGLALWEAKMKQLAERARARQEEAARLGLGQQEAKLYGKKRKWGGTVVAEPQQKEKKGVVPTRQALAVPTDSAVTVSSYAYTKVTGPYSRWI

SEQ ID NO: 194 - protein, 971 aa, Artificial Sequence
  Synthetic Construct
FPTCDCVEQIVEKDEGPYYTHLGSGPTVASIRELMEERYGEKGKAIRIEKVIYTGKEGKSSRGCPIAKWVIRRHTLEEKLLCLVRHRAGHHCQNAVIVILILAWEGIPRSLGDTLYQELTDTLRKYGNPTSRRCGLNDDRTCACQGKDPNTCGASFSFGCSWSMYFNGCKYARSKTPRKFRLAGDNPKEEEVLRKSFQDLATEVAPLYKRLAPQAYQNQVTNEEIAIDCRLGLKEGRPFAGVTACMDFCAHAHKDQHNLYNGCTVVCTLTKEDNRCVGKIPEDEQLHVLPLYKMANTDEFGSEENQNAKVGSGAIQVLTAFPREVRRLPEPAKSCRQRQLEARKAAAEKKKIQKEKLSTPEKIKQEALELAGITSDPGLSLKGGLSQQGLKPSLKVEPQNHFSSFKYSGNAVVESYSVLGNCRPSDPYSMNSVYSYHSYYAQPSLTSVNGFHSKYALPSFSYYGFPSSNPVFPSQFLGPGAWGHSGSSGSFEKKPDLHALHNSLSPAYGGAEFAELPSQAVPTDAHHPTPHHQQPAYPGPKEYLLPKAPLLHSVSRDPSPFAQSSNCYNRSIKQEPVDPLTQAEPVPRDAGKMGKTPLSEVSQNGGPSHLWGQYSGGPSMSPKRTNGVGGSWGVFSSGESPAIVPDKLSSFGASCLAPSHFTDGQWGLFPGEGQQAASHSGGRLRGKPWSPCKFGNSTSALAGPSLTEKPWALGAGDFNSALKGSPGFQDKLWNPMKGEEGRIPAAGASQLDRAWQSFGLPLGSSEKLFGALKSEEKLWDPFSLEEGPAEEPPSKGAVKEEKGGGGAEEEEEELWSDSEHNFLDENIGGVAVAPAHGSILIECARRELHATTPLKKPNRCHPTRISLVFYQHKNLNQPNHGLALWEAKMKQLAERARARQEEAARLGLGQQEAKLYGKKRKWGGTVVAEPQQKEKKGVVPTRQALAVPTDSAVTVSSYAYTKVTGPYSRWI
